(19) United States
(12) Patent Application Publication
(10) Pub. No.: US 2023/0338432 A1
(43) Pub. Date: Oct. 26, 2023

(54) METHODS AND COMPOSITIONS FOR TREATING VIRAL INFECTIONS AND SEQUELAE THEREOF

(71) Applicant: PLURISTEM LTD., Haifa (IL)

(72) Inventors: Yaacob YANAY, Shimshit (IL); Rachel OFIR, Adi (IL); Marc TRITEL, Bet Shemesh (IL)

(73) Assignee: PLURISTEM LTD., Haifa (IL)

(21) Appl. No.: 17/787,616

(22) PCT Filed: Mar. 11, 2021
(86) PCT No.: PCT/IL2021/050268

§ 371 Date: Jun. 21, 2022

Related U.S. Application Data
(60) Provisional application No. 62/988,815, filed on Mar. 12, 2020.
(60) Provisional application No. 63/006,117, filed on Apr. 7, 2020.
(60) Provisional application No. 63/049,144, filed on Jul. 8, 2020.

(30) Foreign Application Priority Data
May 14, 2020 (IL) 274697

(51) Int. Cl. A61K 35/50; A61K 39/00; A61P 31/14

(52) U.S. Cl. CPC A61K 35/50; A61K 39/461; A61K 39/4622; A61K 39/464429; A61K 39/464411; A61K 39/464412; A61K 39/4634; A61K 39/4643; A61P 31/14

(57) ABSTRACT

Disclosed herein are methods and compositions comprising placental adherent stromal cells for treating viral infections and sequelae thereof.

### FIELD

[0001] Disclosed herein are methods and compositions for treating viral infections and sequelae thereof.

### BACKGROUND

[0002] On 31 Dec. 2019, WHO was informed of a cluster of cases of pneumonia of unknown cause detected in Wurlehan City, Hubei Province of China. The causative agent was found to be a coronavirus, given the name SARS-CoV-2 (severe acute respiratory syndrome coronavirus 2), and the disease named “COVID-19” (Corona Virus Disease, 2019). The virus was found to confer high risk for various lung morbidities, and was associated with ICU admission and high mortality. There are now over 100,000,000 confirmed cases and 2.5 million deaths from COVID-19.

[0003] In most patients, SARS-CoV-2 infections are either asymptomatic or present as cases resembling the seasonal flu or those with a mild form of pneumonia. However, some patients exhibit severe disease and develop acute respiratory distress syndrome (ARDS), a clinical phenomenon marked by development of bilateral infiltrates and hypoxemia, defined as a decrease in the ratio of the partial pressure of arterial oxygen to the fraction of inspired oxygen (PaO₂/FiO₂). Many COVID-19 patients who develop ARDS require invasive mechanical ventilation for 10-14 days, and up-to 80% of those patients ultimately succumb to the disease.

[0004] Severely affected patients can also develop a syndrome of dysregulated and systemic immune overactivation, often termed “cytokine storm” or “hyperinflammatory syndrome”. Cytokine storm, associated with an excessive production of proinflammatory cytokines and considered to be one of the major causes of vascular hyperpermeability that worsens the symptoms of ARDS, may lead to multisystem organ failure and mortality.

[0005] SIRS is a dangerous, potential inflammatory consequence of infection. A patient is considered to have SIRS if s/he meets at least 2 of the following criteria: (a) a body temperature of greater than 38 or less than 36 deg. C.; (b) a heart rate of greater than 90; (c) a respiratory rate of greater than 20 and/or PaCO₂ less than 32 mg Hg; and (d) WBC greater than 12,000/mm³ or less than 4,000/mm^{3,} or greater than 10% bands. Sepsis is defined as SIRS plus a suspected or present source of infection. Severe sepsis is indicated by lactic acidosis, SBP less than 90, or an SBP drop greater than 40 mg Hg of normal. Septic shock is indicated by severe sepsis with hypotension, despite adequate fluid resuscitation. Multiple organ dysfunction syndrome is indicated by evidence of at least 2 organs failing. All of these conditions can be sequelae of viral infection and/or virally-induced pneumonia.

[0006] Kawasaki disease (or mucocutaneous lymph node syndrome) is also suspected to be a sequela of COVID-19 and other viral infections. Kawasaki disease is characterized by swelling and/or inflammation in the walls of medium-sized arteries throughout the body. It primarily affects children. The inflammation tends to affect the coronary arteries, which supply blood to the heart muscle. Pediatric multisystem inflammatory syndrome is a syndrome characterized by persistent fever, inflammation (neutrophilia, elevated C-Reactive Protein [CRP] and lymphopaenia) and evidence of single or multi-organ dysfunction (shock, cardiac, respiratory, renal, gastrointestinal or neurological disorder), in some cases with additional features (Guidance: Paediatric multisystem inflammatory syndrome temporally associated with COVID-19, from the Royal College of Paediatrics and Child Health).

### SUMMARY

[0007] Provided herein are methods and compositions for treating and preventing acute kidney injury (AKI) and/or deterioration of patients with viral infections and complications of viral infections, comprising administration of placental adherent stromal cells (ASC), and conditioned media (CM) thereof. Such patients may be at risk, of e.g., Acute Respiratory Distress Syndrome (ARDS), sepsis, pulmonary hypertension, lung fibrosis, Kawasaki disease, pediatric multisystem inflammatory syndrome, AKI, and gastrointestinal injury.

[0008] Conditioned medi[a]/[um]/CM, as used herein, refers to a growth medium that has been used to incubate a cell culture. The present disclosure is not intended to be limited to particular medium formulations; rather, any medium suitable for incubation of placental ASC is encompassed. Any of the embodiments described herein for ASC and methods of their incubation and expansion may also be applied to CM generated via the described ASC/methods.

[0009] In certain embodiments, the described placental ASC have been cultured on a 2-dimensional (2D) substrate, a 3-dimensional (3D) substrate, or a combination thereof. Non-limiting examples of 2D and 3D culture conditions are provided in the Detailed Description and in the Examples.

[0010] Alternatively or in addition, the placental ASC are allogeneic to the subject; or, in other embodiments, are autologous; or, in other embodiments, are xenogeneic

[0011] Reference herein to “growth” of a population of cells is intended to be synonymous with expansion of a cell population. In certain embodiments, ASC (which may be, in certain embodiments, placental ASC), are expanded without substantial differentiation. In various embodiments, the described expansion is on a 2D substrate, on a 3D substrate, or a 2D substrate, followed by a 3D substrate.

[0012] Except where otherwise indicated, all ranges mentioned herein are inclusive.

[0013] Unless otherwise defined, all technical and scientific terms used herein have the same meaning as commonly understood by one of ordinary skill in the art to which this invention belongs. Although methods and materials similar or equivalent to those described herein can be used in the practice or testing of the invention, suitable methods and materials are described below. In case of conflict, the patent specification, including definitions, will control. In addition, the materials, methods, and examples are illustrative only and not intended to be limiting.

### BRIEF DESCRIPTION OF THE DRAWINGS

[0014] The invention is herein described, by way of example only, with reference to the accompanying drawings. With specific reference now to the drawings in detail, it is stressed that the particulars shown are by way of example and for purposes of illustrative discussion of the embodiments of the invention only, and are presented in the cause of providing what is believed to be the most useful and readily understood description of the principles and conceptual aspects of the invention. In this regard, no attempt is made to show structural details of the invention in more detail than is necessary for a fundamental understanding of the invention, the description taken with the drawings making apparent to those skilled in the art how the several forms of the invention may be embodied in practice.

[0015] In the drawings:

[0016] FIG. 1 is a diagram of a bioreactor that can be used to prepare the cells.

[0017] FIGS. 2A-J are plots of luminescence of Luminex® beads, reflective of concentration (vertical axis), for IL-1-ra, Collagen IV-1a, Fibronectin, IL-13, HGF, VEGF-A, IL-4, PDGF-AA, TIMP-1, TGFb2, and TGFb1 (in A-J, respectively) in conditioned medium batches. P250416 R21 and P150518 R02 are maternal batches; R090418 RO1 and R170216 R19 are fetal/serum batches; and PD060918 437B RO1 and PD08016 441 BR09 (also labeled as “PD08016 441B BR09”) are fetal SF batches. Bioreactor media from various batches (horizontal axis) were subjected to no treatment (BR; lanes 1-6 from left), Tangential Flow Filtration (TFF; Pall Corporation; lanes 7-12), or lyophilization (LYP; lanes 13-18) (upper panels). Lower panels depict analyses of CM generated in plates, with a higher cell/medium ratio.

[0018] FIG. 3 is a graph of secretion of IL-10 by PBMC in the absence or presence of ASC. Bars in each group, from left to right are: 1-3: Rat IL-10 after stimulation with 0, 1, or 10 mcg/ml LPS; and 4-6: human IL-10 after stimulation with 0, 1, or 10 mcg/ml LPS.

[0019] FIGS. 4A-B are charts depicting lymphocyte proliferation, measured by [³H]thymidine incorporation. Three replicates of each sample were performed. A. 2×10⁵ peripheral blood (PB)-derived MNC (donor A) were stimulated with an equal number of irradiated (3000 Rad) PB-derived MNCs (donor B) in an MLR test, in the presence of different amounts of ASC. B. PB-derived MNCs stimulated with ConA (1.5 mg/ml).

[0020] FIGS. 5A-C are charts depicting ASC regulation of pro- and anti-inflammatory cytokine secretion by human MNCs (isolated from peripheral blood). A-B depict secretion of IFN-gamma (A) and TNF-alpha (B) stimulation with ConA. C depicts secretion of IFN-gamma, TNF-alpha and IL-10 (left, middle, and right bars in each series, respectively) following stimulation with LPS. Supernatants were analyzed by ELISA

[0021] FIG. 6 is a graph of secretion profile of ASC under normoxic or hypoxic conditions.

[0022] FIGS. 7A-B are graphs (each split into 2 panels) depicting secretion, measured by fluorescence, of various factors following incubation of ASC with TNF-alpha+IFN-gamma (gray bars) or control media (black bars) in two separate experiments. C-D are graphs depicting fold-increase of secretion, measured by fluorescence, of GRO, IL-8, MCP-1, and RANTES (C), and IL-6, MCP-3, Angiogenin, Insulin-like Growth Factor Binding Protein-2 (IGFBP-2), Osteopontin, and Osteoprotegerin (D) following incubation of ASC with TNF-alpha alone, relative to incubation with control media (no cytokines).

[0023] FIGS. 8A-B are graphs depicting fold-increase relative to control medium (containing no cytokines) in secretion of MCP-1 (A) and GM-CSF (B) in several experiments, as measured by ELISA.

[0024] FIG. 9 is a plot showing RVSP (vertical axis) of nude mice given MCT and treated with (ordered from left to right) placebo or 15, 25, or 35×10⁶/kg. ASC.

[0025] FIGS. 10A-E are plots showing effect of ASC treatment on weight (A), exercise capacity (B), O₂ saturation (C), lung histology (D), and collagen deposition in the lungs as assessed by collagen (E) and hydroxyproline (F) content, following induction of lung fibrosis. For A-B, lanes from left to right are control; bleomycin (BL)+vehicle; and BL+batch #1 or batch #2 of ASC. For C, BL+vehicle was the group that dipped to 80%. For D, upper left, upper right, lower left, and lower right panels are control; BL+vehicle; and BL+batch #1 or batch #2 of ASC. For E-F, lanes from left to right are BL+vehicle; BL+batch #1 or batch #2 of ASC; and control,

[0026] FIG. 11A is a plot of day 21 necrosis as assessed PAS staining in untreated a low-dose ASC-treated mice, following induction of ischemia/reperfusion injury. Lanes from left to right are naive, IRI/untreated, IRI/IM-day 0, IRI/IM-day 1, IRI/IM-day 3, IRI/IV-day 0, IRI/IV-day 1, and IRI/IV-day 3. B-J are images of tissues stained for necrosis, for an untreated IRI mouse (B; 25.3% necrosis); low-dose IM ASC given on day 0 (C; 25.4% necrosis), 1 (D; 0.4% necrosis), or 3 (E; 2.3% necrosis); high-dose IM ASC given on day 1 (F; 0% necrosis) or 3 (G; 0% necrosis); and high-dose IV ASC given on day 0 (H; 4.5% necrosis), 1 (I; 4.5% necrosis), or 3 (J; 5.9% necrosis).

[0027] FIGS. 12A-B are plots of average (A) or individual (B) CRP levels (vertical axis) vs. days from ASC administration (horizontal axis). In B, data from individual subjects are represented by different symbols and/or line patterns. Levels after the first and second (where applicable) administration are shown as black and gray lines, respectively.

[0028] FIGS. 13A-B are plots of PEEP (Positive End Expiratory Pressure; A) and pH (B) (vertical axis) vs. days from ASC administration (horizontal axis).

[0029] FIGS. 14A-B are chest radiographs of a patient showing improvement after (B) vs. before (A) ASC administration.

[0030] FIG. 15 is a plot of creatinine of (vertical axis) vs. days from ASC administration (horizontal axis).

[0031] FIGS. 16A-J are plots of concentration of cytokines (vertical axis; units pg./mL.) of IFN-g (A-B), IL-2 (C-E), TNF-a (F-G), and CXCL-10 (H-J), in BALF (A, C, E, F, H, J) or serum (B, D, G, I). In E and J, both ASC-treated groups were combined into the single dataset. K-L are plots of lung injury score and alveolar thickening. Treatment groups are shown on horizontal axis. Asterisks above bars indicate significance vs. Naïve. P values of specific pairs are indicated: *p<0.05, **p<0.01, ***p<0.001, ****p<0.0001.

### DETAILED DESCRIPTION

[0032] Before explaining at least one embodiment of the invention in detail, it is to be understood that the invention is not limited in its application to the details set forth in the following description or exemplified by the Examples. The invention is capable of other embodiments or of being practiced or carried out in various ways. Also, it is to be understood that the phraseology and terminology employed herein is for the purpose of description and should not be regarded as limiting.

[0033] Aspects of the invention relate to methods and compositions that comprise placental adherent stromal cells (ASC) and their conditioned media (CM). In some embodiments, the ASC may be human ASC, or in other embodiments animal ASC.

[0034] In one embodiment, there is provided a method for treating, or in another embodiment reducing an incidence of, or in another embodiment ameliorating, a viral infection, comprising administering a composition that comprises a cultured placental ASC, thereby treating, reducing an incidence of, or ameliorating a viral infection. In another embodiment, there is provided a composition that comprises a cultured placental ASC, for treating, reducing an incidence of, or ameliorating, a viral infection. In certain embodiments, the cultured ASC has/have been incubated on a 3D substrate. In certain embodiments, the viral infection is a pulmonary infection. Pulmonary infection, as used herein, refers to an infection that comprises colonization of the lungs with the described virus; additional presence of the virus in other body tissues is not excluded. In other embodiments, there is provided a method of suppressing viral replication in a subject in need thereof, the method comprising the step of administering to the subject a composition comprising ASC. In still other embodiments, there is provided a method of reducing a viral load in a subject in need thereof, the method comprising the step of administering to the subject a composition comprising ASC.

[0035] In various embodiments, the placental ASC are maternal tissue-derived ASC (ASC from a maternal portion of the placenta); fetal tissue-derived ASC (ASC from a fetal portion of the placenta); or a mixture thereof. Alternatively or in addition, the placental ASC are allogeneic to the subject; or, in other embodiments, are autologous; or, in other embodiments, are xenogeneic. In certain embodiments, the composition is an injected composition, e.g., intramuscularly injected.

[0036] In another embodiment, there is provided a method for preventing, ameliorating, or reducing an incidence of deterioration of a subject with a viral infection, comprising administering a composition that comprises a cultured placental ASC, thereby preventing, ameliorating, or reducing an incidence of deterioration of a subject with a viral infection. In another embodiment, there is provided a composition that comprises a cultured placental ASC, for preventing, ameliorating, or reducing an incidence of deterioration of a subject with a viral infection. In certain embodiments, the viral infection is a pulmonary infection.

[0037] In another embodiment, there is provided a method for treating, or in another embodiment reducing an incidence of, or in another embodiment ameliorating, ARDS resulting from (or, in other embodiments, secondary to) a viral infection, comprising administering a composition that comprises a cultured placental ASC, thereby treating, reducing an incidence of, or ameliorating ARDS. In another embodiment, there is provided a composition that comprises a cultured placental ASC, for treating, reducing an incidence of, or ameliorating ARDS resulting from a viral infection. In certain embodiments, the ARDS is secondary to pneumonia, which may in turn be secondary to a viral infection. In other embodiments, the pneumonia is caused by a coronavirus, which is, in some embodiments, SARS-CoV-2. In some embodiments, the infection is a pulmonary infection.

[0038] Methods of identifying/diagnosing ARDS are known in the art. In certain embodiments, ARDS is characterized by bilateral infiltrates and hypoxemia, e.g., a decrease in the ratio of the partial pressure of arterial oxygen to the fraction of inspired oxygen (PaO₂/FiO₂). In further embodiments, the PF ratio is <300 mmHg, and the subject requires invasive mechanical ventilation, which may be, in certain embodiments, a minimum of 5 cm H₂0 PEEP (or Continuous positive airway pressure [CPAP]). In other embodiments, the subject has severe ARDS, e.g., a PF ratio of <100 mmHg In still embodiments, the subject has moderate ARDS, e.g., a PF ratio of 100-200 mmHg. In other embodiments, the subject has mild ARDS, e.g., a PF ratio of 200-300 mmHg As provided herein, ASC reduced PEEP (Positive End Expiratory Pressure) in patients with ARDS.

[0039] In yet another embodiment, there is provided a method for treating, or in another embodiment reducing an incidence of, or in another embodiment ameliorating, sepsis resulting from a viral infection, comprising administering a composition that comprises a cultured placental ASC, thereby treating, reducing an incidence of, or ameliorating sepsis. In certain embodiments, the cultured ASC has/have been incubated on a 3D substrate. In another embodiment, there is provided a composition that comprises a cultured placental ASC, for treating, reducing an incidence of, or ameliorating sepsis resulting from a viral infection. In certain embodiments, the sepsis is secondary to pneumonia, which may in turn be secondary to a viral infection. In other embodiments, the pneumonia is caused by a coronavirus, which is, in other embodiments, SARS-CoV-2. In specific embodiments, the sepsis is severe sepsis. In certain embodiments, the viral infection is a pulmonary infection.

[0040] In still another embodiment, there is provided a method for treating, or in another embodiment reducing an incidence of, or in another embodiment ameliorating, pulmonary hypertension resulting from a viral infection, comprising administering a composition that comprises a cultured placental ASC, thereby treating, reducing an incidence of, or ameliorating pulmonary hypertension. In another embodiment, there is provided a composition that comprises a cultured placental ASC, for treating, reducing an incidence of, or ameliorating pulmonary hypertension resulting from a viral infection. In certain embodiments, the pulmonary hypertension is secondary to pneumonia, which may in turn be secondary to a viral infection. In other embodiments, the pneumonia is caused by a coronavirus, which is, in other embodiments, SARS-CoV-2. In certain embodiments, the viral infection is a pulmonary infection.

[0041] In another embodiment, there is provided a method for treating, or in another embodiment reducing an incidence of, or in another embodiment ameliorating, multiple organ dysfunction syndrome resulting from a viral infection, comprising administering a composition that comprises a cultured placental ASC, thereby treating, reducing an incidence of, or ameliorating multiple organ dysfunction syndrome. In another embodiment, there is provided a composition that comprises a cultured placental ASC, for treating, reducing an incidence of, or ameliorating multiple organ dysfunction syndrome resulting from a viral infection. In certain embodiments, the multiple organ dysfunction syndrome is secondary to pneumonia, which may in turn be secondary to a viral infection. In other embodiments, the pneumonia is caused by a coronavirus, which is, in other embodiments, SARS-CoV-2. In certain embodiments, the viral infection is a pulmonary infection.

[0042] In further embodiments, there is provided a method for treating, or in another embodiment reducing an incidence of, or in another embodiment ameliorating, lung fibrosis resulting from a viral infection, comprising administering a composition that comprises a cultured placental ASC, thereby treating, reducing an incidence of, or ameliorating lung fibrosis. In another embodiment, there is provided a composition that comprises a cultured placental ASC, for treating, reducing an incidence of, or ameliorating lung fibrosis resulting from a viral infection. In certain embodiments, the cultured ASC has/have been incubated on a 3D substrate. In certain embodiments, the fibrosis is secondary to pneumonia, which may in turn be secondary to a viral infection. In other embodiments, the pneumonia is caused by a coronavirus, which is, in other embodiments, SARS-CoV-2. In certain embodiments, the viral infection is a pulmonary infection.

[0043] In yet other embodiments, there is provided a method for treating, or in another embodiment reducing an incidence of, or in another embodiment ameliorating, acute kidney injury (AKI), comprising administering a composition that comprises a cultured placental ASC, thereby treating, reducing an incidence of, or ameliorating AKI. In another embodiment, there is provided a composition that comprises a cultured placental ASC, for treating, reducing an incidence of, or ameliorating AKI resulting from a viral infection; e.g., a pulmonary infection. In certain embodiments, the AKI results from a viral infection. In other embodiments, the kidney injury is secondary to pneumonia and/or ARDS and/or accompanying sepsis—which may in turn be secondary to a viral infection. In other embodiments, the pneumonia is caused by a coronavirus, which is, in other embodiments, SARS-CoV-2. As provided herein, ASC reduce elevated creatinine levels in COVID-19 patients with ARDS.

[0044] In yet other embodiments, there is provided a method for treating, or in another embodiment reducing an incidence of, or in another embodiment ameliorating, AKI, comprising administering a composition that comprises a cultured ASC, wherein said ASC have been incubated on a 3D substrate, thereby treating, reducing an incidence of, or ameliorating AKI. In another embodiment, there is provided a composition that comprises a 3D-cultured ASC, for treating, reducing an incidence of, or ameliorating AKI resulting from a viral infection; e.g., a pulmonary infection. In certain embodiments, the AKI results from a viral infection. In other embodiments, the kidney injury is secondary to pneumonia and/or ARDS and/or accompanying sepsis—which may in turn be secondary to a viral infection. In other embodiments, the pneumonia is caused by a coronavirus, which is, in other embodiments, SARS-CoV-2. As provided herein, ASC reduce elevated creatinine levels in COVID-19 patients with ARDS.

[0045] In still other embodiments, there is provided a method for treating, or in another embodiment reducing an incidence of, or in another embodiment ameliorating, gastrointestinal injury resulting from a viral infection, comprising administering a composition that comprises a cultured placental ASC, thereby treating, reducing an incidence of, or ameliorating gastrointestinal injury. In another embodiment, there is provided a composition that comprises a cultured placental ASC, for treating, reducing an incidence of, or ameliorating gastrointestinal injury resulting from a viral infection. In certain embodiments, the pneumonia is caused by a coronavirus, which is, in other embodiments, SARS-CoV-2. In certain embodiments, the viral infection is a pulmonary infection.

[0046] In still other embodiments, there is provided a method for treating or ameliorating a coronavirus infection, comprising administering a composition that comprises a cultured placental ASC, thereby treating or ameliorating a coronavirus infection. In another embodiment, there is provided a composition that comprises a cultured placental ASC, for treating or ameliorating a coronavirus infection. In certain embodiments, the viral infection is a pulmonary infection.

[0047] In still other embodiments, there is provided a method for treating or ameliorating a coronavirus infection, comprising administering a composition that comprises a ASC, wherein said ASC have been incubated on a 3D substrate, thereby treating or ameliorating a coronavirus infection. In another embodiment, there is provided a composition that comprises a 3D-cultured ASC, for treating or ameliorating a coronavirus infection. In certain embodiments, the viral infection is a pulmonary infection.

[0048] In other embodiments, there is a provided a method of treating or reducing an incidence of a complication of a viral infection, e.g., a pulmonary infection, comprising administering a composition that comprises a cultured placental ASC. In certain embodiments, the described complication is at least one of vasculitis, lymphadenopathy, or both (a non-limiting example of which is Kawasaki disease). In other embodiments, the complication is pediatric multisystem inflammatory syndrome.

[0049] In other embodiments, there is a provided a method of treating or reducing an incidence of a complication of a viral infection, e.g., a pulmonary infection, comprising administering a composition that comprises a cultured ASC, wherein said ASC have been incubated on a 3D substrate. In certain embodiments, the described complication is at least one of vasculitis, lymphadenopathy, or both (a non-limiting example of which is Kawasaki disease). In other embodiments, the complication is pediatric multisystem inflammatory syndrome.

[0050] In still other embodiments, there is provided a method for treating, preventing, or ameliorating a pneumonia, comprising administering a composition that comprises a cultured placental ASC, wherein said pneumonia is associated with a viral infection, thereby treating, preventing, or ameliorating pneumonia. In certain embodiments, the viral infection is a pulmonary infection.

[0051] In still other embodiments, there is provided a method for treating, preventing, or ameliorating a complication of a pneumonia, comprising administering a composition that comprises a cultured placental ASC, wherein said pneumonia is associated with a viral infection, thereby treating, preventing, or ameliorating a complication of pneumonia. In certain embodiments, the viral infection is a pulmonary infection.

[0052] In still other embodiments, there is provided a method for treating, preventing, or ameliorating systemic inflammation, comprising administering a composition that comprises a cultured placental ASC, wherein said inflammation is associated with a viral infection, thereby treating, preventing, or ameliorating systemic inflammation. As provided herein, ASC sharply reduce CRP levels in COVID-19-infected subjects, particularly in subjects with strongly elevated CRP levels. In certain embodiments, the subject has a CRP level over 200 milligrams/milliliter (mg./mL.); or, in other embodiments, over 250 mg./mL., 300 mg./mL., or 350 mg./mL.; or, in yet other embodiments, between 200-400 mg./mL., 250-400 mg./mL., 300-400 mg./mL. or 350-400 mg./mL. In certain embodiments, the viral infection is a pulmonary infection.

[0053] In still other embodiments, there is provided a method for treating, preventing, or ameliorating a long-term sequela of a viral infection, comprising administering a composition that comprises a cultured placental ASC, thereby treating, preventing, or ameliorating a long-term sequela of a viral infection. In another embodiment, there is provided a composition that comprises a cultured placental ASC, for treating, reducing an incidence of, or ameliorating long-term sequela of a viral infection. In certain embodiments, the cultured ASC has/have been incubated on a 3D substrate. In certain embodiments, the virus is a coronavirus, which is, in other embodiments, SARS-CoV-2. Alternatively or in addition, the sequela is first observed after the patient tests negative (e.g., by a nasal swab) for an active viral infection; or, in other embodiments, at least 2, 3, 4, 5, 7, 10, 12, 18, or 24 weeks after the viral infection is believed to be resolved and/or testing negative. In certain embodiments, the sequela is fatigue. In other embodiments, the sequela is anxiety. In yet other embodiments, the sequela is shortness of breath. In still other embodiments, the sequela is sustained cough. In other embodiments, the sequela is limb pain (e.g., arm and/or leg pain), which may be, in various embodiments, a burning sensation, a tingling, or a feeling of unease in the affected limb(s), each of which represents a separate embodiment. In certain embodiments, the viral infection is a pulmonary infection.

[0054] In other embodiments, the coronavirus described herein is human and bat severe acute respiratory syndrome coronavirus (SARS-CoV) of the species Severe acute respiratory syndrome-related coronavirus, e.g. SARS-CoV-1 and SARS-CoV-2.

[0055] In other embodiments, the described virus is any virus in the family Coronaviridae, e.g. comprising Cornidovirineae (Orthocoronavirinae) and Letovirinae. In other embodiments, the described virus is any virus in the suborder Cornidovirineae, e.g., comprising Alphacoronaviruses, Betacoronaviruses, Gammacoronaviruses, and Deltacoronaviruses. In other embodiments, the described virus is any virus in the order Nidovirales, e.g., comprising Cornidovirineae, Tornidovirineae, Mesnidovirineae, Ronidovirineae, Nanidovirineae, and Arnidovirineae.

[0056] In other embodiments, the described virus is any virus in the realm Riboviria. Taxonomy of coronaviruses is known to those skilled in the art, and is described, e.g., in Siddell, S. G. et al. (Additional changes to taxonomy ratified in a special vote by the International Committee on Taxonomy of Viruses (October 2018). Arch. Virol. 164, 943-946 [2019]); Ziebuhr, J. et al. (Proposal 2017.013S. A.vl. Reorganization of the family Coronaviridae into two families, Coronaviridae (including the current subfamily Coronavirinae and the new subfamily Letovirinae) and the new family Tobaniviridae (accommodating the current subfamily Torovirinae and three other subfamilies), revision of the genus rank structure and introduction of a new subgenus rank. (ICTV, 2017); https://ictv.global/proposal/2017.Nidoovirales/.); Ziebuhr, J. et al. (Proposal 2019.021S.Ac.v1. Create ten new species and a new genus in the subfamily Orthocoronavirinae of the family Coronaviridae and five new species and a new genus in the subfamily Serpentovirinae of the family Tobaniviridae. (ICTV, 2019); and https://ictv.global/proposal/2019.Nidoovirales/.) Gorbalenya, A. E., Baker, S. C., Baric, R. S. et al. The species Severe acute respiratory syndrome-related coronavirus: classifying 2019-nCoV and naming it SARS-CoV-2. Nat Microbiol (2020).

[0057] In certain embodiments, the treated virus is SARS-CoV-2, e.g., a virus having a sequence at least 96%, or in other embodiments, at least 91%, at least 92%, at least 93%, at least 94%, at least 95%, at least 96%, at least 97%, at least 98%, or at least 99% homologous to at least 1 sequence selected from the nucleotide sequences set forth in GenBank Accession Nos. NC_045512.2, MT126808, MT123290, MT093571, MT066176, MT263074, MT276331, MT233523, MT066156, and LC528233 (SEQ ID NOs. 1-10).

[0058] In other embodiments, the treated coronavirus has a sequence at least 96%, or in other embodiments, at least 91%, at least 92%, at least 93%, at least 94%, at least 95%, at least 96%, at least 97%, at least 98%, or at least 99% homologous to at least 1 sequence selected from the nucleotide sequences set forth in GenBank Accession Nos. NC_004718.3, AY274119.3, GU553363.1, DQ182595.1, AY297028.1, and AY515512.1 (SEQ ID NOs. 11-16).

[0059] In other embodiments, the treated virus is related to a bat coronavirus, e.g., related to GenBank Accession No. DQ022305 (SEQ ID NO. 17).

[0060] In another embodiment, there is provided use of ASC for the manufacture of a medicament for treating or ameliorating any of the diseases, disorders, and complications mentioned herein, each of which represents a separate embodiment.

[0061] In still other embodiments, there is provided an article of manufacture, comprising (a) a packaging material, wherein the packaging material comprises a label for use in any of the diseases, disorders, and complications mentioned herein, each of which represents a separate embodiment; and (b) a pharmaceutical composition comprising ASC. In some embodiments, the pharmaceutical composition is frozen. In other embodiments, the label indicates use in suppressing viral replication. In still other embodiments, the label indicates use in reducing viral load. As provided herein, administration of a therapeutically effective amount of ASC is useful in treating viral infections.

[0062] In other embodiments, there is provided a method of treating hypercytokinemia (also known, in some embodiments, as “cytokine storm”), the method comprising the step of administering to the subject a therapeutically effective amount of ASC, thereby treating the hypercytokinemia in the subject. Methods of diagnosing and tracking the progression of hypercytokinemia are well known in the art, and include, inter alia, measurement of serum cytokine levels and/or expression in PBMC of cytokines, chemokines, and/or death proteins such as TRAIL, as described in Bray M et al., 2001, Yen J Y et al., 2011, and the references cited therein.

[0063] In other embodiments, there is provided a method of treating systemic inflammatory response syndrome (SIRS), the method comprising the step of administering to the subject a therapeutically effective amount of ASC, thereby treating the SIRS in the subject. Methods of diagnosing and tracking the progression of SIRS are well known in the art, and include, inter alia, measurement of serum cytokine levels and/or expression in PBMC of cytokines, chemokines, death proteins such as TRAIL, and/or fibrin-related genes as described in Bray M et al., 2001, Geisbert T W et al., 2003, Yen J Y et al., 2011, and the references cited therein.

[0064] In another embodiment is provided use of ASC for the manufacture of a medicament identified for treating hypercytokinemia or SIRS. In still other embodiments, there is provided a pharmaceutical composition for treating hypercytokinemia or SIRS, comprising the described ASC.

[0065] In certain embodiments, the herein-described SIRS patient exhibits leukopenia, e.g., an absolute WBC count below 3500 cells per microliter [/μL]); or, in other embodiments, below 3000, 2500, 2000, 1500, or 1000 cells/μL, e.g., for an adult. Alternatively, the subject exhibits leukocytosis, e.g., an absolute WBC count above >10,000 cells/μL; or in other embodiments, above 10,500, 11,000, 12,000, 13,000, 15,000, 18,000, or 20,000 cells/μL, e.g., for an adult.

[0066] Alternatively or in addition, the SIRS patient exhibits both leukopenia and lymphopenia (83.2%), e.g., a lymphocyte count below 1000/μL; or, in other embodiments, below 800, 600, 500, 400, 300, 200, or 100 cells/μL, e.g., for an adult; and/or (in different embodiments) thrombocytopenia, e.g., a platelet count below 50,000/μL; or, in other embodiments, below 100,000, 80,000, 60,000, 40,000, 30,000, 20,000, or 20,000/μL, e.g., for an adult.

[0067] In still other embodiments, the SIRS patient exhibits elevated levels of C-reactive protein; e.g., greater than 3 milligrams per liter (mg/L); or, in other embodiments, greater than 4, 5, 6, 8, or 10 mg/L. Each embodiment of SIRS symptoms and criteria may be freely combined, except where self-contradictory (e.g., leukopenia and leukocytosis).

[0068] In other embodiments, there is provided a method of treating dysregulated coagulation, the method comprising the step of administering to the subject a therapeutically effective amount of ASC, thereby treating the dysregulated coagulation in the subject. Methods of diagnosing and tracking the progression of dysregulated coagulation are well known in the art, and include, inter alia, measurement of intravascular coagulation, e.g. using ROTEM® delta, available from Tem International GmbH, or as described in Monaca E et al., 2014; and expression in PBMC of fibrin-related genes, as described in Bray M et al., 2001, Geisbert T W et al., 2003, Yen J Y et al., 2011, and the references cited therein.

[0069] In another embodiment is provided use of ASC for the manufacture of a medicament identified for treating dysregulated coagulation. In still other embodiments, there is provided a pharmaceutical composition for treating dysregulated coagulation, comprising the described ASC.

[0070] In other embodiments, there is provided a method of treating septic shock, the method comprising the step of administering to the subject a therapeutically effective amount of ASC, thereby treating septic shock in the subject. Methods of diagnosing and tracking the progression of septic shock are well known in the art, and include, inter alia, measurement of expression levels of tissue factor in primate monocytes and/or macrophages, as described in Bray M et al., 2003, and the references cited therein. In some embodiments, the septic shock is secondary to a hemorrhagic fever virus. In other cases, septic shock may be caused by other pathogens, for example influenza virus. In still other cases, septic shock may be independent of a pathogen, or in other embodiments may be of unknown etiology. In another embodiment is provided use of ASC for the manufacture of a medicament identified for treating septic shock. In still other embodiments, there is provided a pharmaceutical composition for treating septic shock, comprising the described ASC.

[0071] In various embodiments, the described placental ASC are maternal tissue-derived ASC; fetal tissue-derived ASC; or a mixture thereof. Alternatively or in addition, the placental ASC are allogeneic to the subject; or, in other embodiments, are autologous; or, in other embodiments, are xenogeneic. In other embodiments, conditioned medium (CM) of placental ASC is utilized in place of ASC. In other embodiments, the composition is an injected composition, e.g., intramuscularly injected. Any of these embodiments may be freely combined with any of the therapeutic embodiments mentioned herein.

[0072] As provided herein, placental ASC and CM exhibit ability to ameliorate inflammation, ischemia/reperfusion injury, muscle trauma, irradiation and hematological disorders; to modulate and support recovery of various organ systems, e.g., by inducing regeneration and modulating undesired inflammation; and in treating pulmonary hypertension, lung fibrosis, acute kidney injury, and gastrointestinal injury.

[0073] In still other embodiments, there is provided a composition for treating or ameliorating any of the diseases, disorders, and complications mentioned herein, each of which represents a separate embodiment, comprising cultured placental ASC. In other embodiments, the composition comprises placental ASC conditioned medium (“ASC-CM”).

[0074] In yet other embodiments, the described placenta-derived ASC secrete elevated levels of RANTES (C-C motif chemokine 5; UniProt No. P13501). In some embodiments, the RANTES secretion is measured after removing the cells from the bioreactor. In certain embodiments, the RANTES secretion is at least 2-fold, 3-fold, 4-fold, 5-fold, 6-fold, 8-fold, 10-fold, 15-fold, 20-fold, 30-fold, 50-fold, 70-fold, 100-fold, 150-fold, 200-fold, 300-fold, 500-fold, 700-fold, or 1000-fold as high as cells prepared in the absence of added cytokines. In certain embodiments, as provided herein, RANTES secretion is measured by incubating 5×10⁵ ASC for 24 hours under standard conditions, then replacing the medium with serum medium and incubating for an additional 24 hours. In more specific embodiments, at least 20 picrograms (pg.), 30 pg., 50 pg., 70 pg., 100 pg., 150 pg., 200 pg., 300 pg., 400 pg., 500 pg., 700 pg., 1000 pg., 1500 pg., 2000 pg., 3000 pg., 4000 pg., 5000 pg., 6000 pg., 8000 pg., 10,000 pg., 15,000 pg., or 20,000 pg. of RANTES are secreted by the cells under these conditions. In other embodiments, there is provided a use of these ASC in any of the therapeutic embodiments described herein, each of which represents a separate embodiment.

### Basal Media for Expansion of ASC

[0075] Those skilled in the art will appreciate that growth media are utilized to expand the described placental ASC and/or produce the described CM for the compositions and methods described herein. Non-limiting examples of base media useful in 2D and 3D culturing include Minimum Essential Medium Eagle, ADC-1, LPM (Bovine Serum Albumin-free), F10(HAM), F12 (HAM), DCCM1, DCCM2, RPMI 1640, BGJ Medium (with and without Fitton-Jackson Modification), Basal Medium Eagle (BME-with the addition of Earle's salt base), Dulbecco's Modified Eagle Medium (DMEM-without serum), Yamane, IMEM-20, Glasgow Modification Eagle Medium (GMEM), Leibovitz L-15 Medium, McCoy's 5A Medium, Medium M199 (M199E-with Earle's sale base), Medium M199 (M199H-with Hank's salt base), Minimum Essential Medium Eagle (MEM-E-with Earle's salt base), Minimum Essential Medium Eagle (MEM-H-with Hank's salt base) and Minimum Essential Medium Eagle (MEM-NAA with non-essential amino acids), among numerous others, including medium 199, CMRL 1415, CMRL 1969, CMRL 1066, NCTC 135, MB 75261, MAB 8713, DM 145, Williams' G, Neuman & Tytell, Higuchi, MCDB 301, MCDB 202, MCDB 501, MCDB 401, MCDB 411, MDBC 153, and mixtures thereof in any proportions. In certain embodiments, DMEM is used. These and other useful media are available from GIBCO, Grand Island, N.Y., USA and Biological Industries, Bet HaEmek, Israel, among others.

[0076] In some embodiments, the medium may be supplemented with additional substances. Non-limiting examples of such substances are serum, which is, in some embodiments, fetal serum of cows or other species, which is, in some embodiments, 5-15% of the medium volume. In certain embodiments, the medium contains 1-5%, 2-5%, 3-5%, 1-10%, 2-10%, 3-10%, 4-15%, 5-14%, 6-14%, 6-13%, 7-13%, 8-12%, 8-13%, 9-12%, 9-11%, or 9.5%-10.5% serum, which may be FBS, or in other embodiments another animal serum.

[0077] Alternatively or in addition, the medium may be supplemented by growth factors, vitamins (e.g. ascorbic acid), cytokines, salts (e.g. B-glycerophosphate), steroids (e.g. dexamethasone) and hormones e.g., growth hormone, erythropoietin, thrombopoietin, interleukin 3, interleukin 7, macrophage colony stimulating factor, c-kit ligand/stem cell factor, osteoprotegerin ligand, insulin, insulin-like growth factor, epidermal growth factor, fibroblast growth factor, nerve growth factor, ciliary neurotrophic factor, platelet-derived growth factor, and bone morphogenetic protein.

[0078] It will be appreciated that additional components may be added to the culture medium. Such components may be antibiotics, antimycotics, albumin, amino acids, and other components known to the art for the culture of cells.

[0079] The various media described herein, i.e., the 2D growth medium and the 3D growth medium, may be independently selected from each of the described embodiments relating to medium composition. In various embodiments, any medium suitable for growth of cells in a standard tissue apparatus and/or a bioreactor may be used.

[0080] It will also be appreciated that in certain embodiments, when the described ASC are intended for administration to a human subject, the cells and the culture medium (e.g., with the above-described medium additives) are substantially xeno-free, i.e., devoid of any animal contaminants e.g., mycoplasma. For example, the culture medium can be supplemented with a serum-replacement, human serum and/or synthetic or recombinantly produced factors.

### ASC and Sources Thereof

[0081] With reference to placenta-derived ASC, except where indicated otherwise, “placenta”, “placental tissue”, and the like, as used herein, refer to any portion of the placenta. Placenta-derived ASC may be obtained, in various embodiments, from either fetal or, in other embodiments, maternal regions of the placenta, or in other embodiments, from both regions. More specific embodiments of maternal sources are decidua regions (e.g., decidua basalis, decidua capsularis, and decidua parietalis). More specific embodiments of fetal sources are amnion and chorion, including villous chorion. In certain embodiments, tissue specimens are washed in a physiological buffer, non-limiting examples of which are phosphate-buffered saline (PBS) and Hank's buffer. In certain embodiments, the placental tissue from which ASC are harvested includes at least one of the chorionic and decidua regions of the placenta, or, in still other embodiments, both the chorionic and decidua regions of the placenta. More specific embodiments of chorionic regions are chorionic mesenchymal and chorionic trophoblastic tissue. In a non-limiting embodiment, a mixture of maternal and fetal placental cells is obtained by mincing whole placenta; or, in other embodiments, a portion thereof; or, in still other embodiments, whole placenta, apart from the amnion, chorion, and umbilical cord.

[0082] Placental cells may be obtained, in various embodiments, from a full-term or pre-term placenta. In some embodiments, the placental tissue is optionally minced, followed by enzymatic digestion. Single-cell suspensions can be made, in other embodiments, by treating the tissue with a digestive enzyme (see below) or/and physical disruption, a non-limiting example of which is mincing and flushing the tissue parts through a nylon filter or by gentle pipetting (e.g., Falcon, Becton, Dickinson, San Jose, CA) with washing medium. In some embodiments, the tissue treatment includes use of a DNAse, a non-limiting example of which is Benzonase from Merck.

[0083] Optionally, residual blood is removed from the placenta before cell harvest. This may be done by a variety of methods known to those skilled in the art, for example by perfusion. “Perfuse” or “perfusion” herein refers to pouring or passaging a fluid over or through an organ or tissue. In certain embodiments, the placental tissue may be from any mammal, while in other embodiments, the placental tissue is human A convenient source of placental tissue is a post-partum placenta (e.g., less than 10 hours after birth), however, a variety of sources of placental tissue or cells may be contemplated by the skilled person. In other embodiments, the placenta is used within 8 hours, within 6 hours, within 5 hours, within 4 hours, within 3 hours, within 2 hours, or within 1 hour of birth. In certain embodiments, the placenta is kept chilled prior to harvest of the cells. In other embodiments, prepartum placental tissue is used. Such tissue may be obtained, for example, from a chorionic villus sampling or by other methods known in the art. Once placental cells are obtained, they are, in certain embodiments, allowed to adhere to an adherent material (e.g., configured as a surface) to thereby isolate adherent cells. In some embodiments, the donor is 35 years old or younger, while in other embodiments, the donor may be any woman of childbearing age.

[0084] Placenta-derived cells can be propagated, in some embodiments, by using a combination of 2D and 3D culturing conditions. Conditions for propagating adherent cells in 2D and 3D culture are further described hereinbelow and in the Examples section which follows.

[0085] Those skilled in the art will appreciate, in light of the present disclosure, that cells may be, in some embodiments, extracted from a placenta, for example using physical and/or enzymatic tissue disruption, followed by marker-based cell sorting, and then may be subjected to the culturing methods described herein.

### Treatment of Cells With Pro-Inflammatory Cytokines

[0086] In certain embodiments of the described methods and compositions, the composition of the medium is not varied during the course of the culturing process used to expand the placental ASC that are used in the described methods and compositions and/or for producing the described CM. In other words, no attempt is made to intentionally vary the medium composition by adding or removing factors or adding fresh medium with a different composition than the previous medium. Reference to varying the composition of the medium does not include variations in medium composition that automatically occur as a result of prolonged culturing, for example due to the absorption of nutrients and the secretion of metabolites by the cells therein, as will be appreciated by those skilled in the art.

[0087] In other embodiments, the method used to expand the steps comprises 2D culturing, followed by 3D culturing. In certain embodiments, the 3D culturing method comprises the sub-steps of: (a) incubating ASC in a 3D culture apparatus in a first growth medium, wherein no inflammatory cytokines have been added to the first growth medium; and (b) subsequently incubating the ASC in a 3D culture apparatus in a second growth medium, wherein one or more pro-inflammatory cytokines have been added to the second growth medium. Those skilled in the art will appreciate, in light of the present disclosure, that the same 3D culture apparatus may be used for the incubations in the first and second growth medium by simply adding cytokines to the medium in the culture apparatus, or, in other embodiments, by removing the medium from the culture apparatus and replacing it with medium that contains cytokines. In other embodiments, a different 3D culture apparatus may be used for the incubation in the presence of cytokines, for example by moving (e.g. passaging) the cells to a different incubator, before adding the cytokine-containing medium.

[0088] Other embodiments of pro-inflammatory cytokines, and methods comprising same, are described in WO 2017/141181 to Pluristem Ltd, by Zami Aberman et al., which is incorporated by reference herein.

### Serum-Free and Serum Replacement Media

[0089] In other embodiments, the described cell populations are produced by expanding a population of placental ASC in a medium that contains less than 5% animal serum. In certain embodiments, the cell population contains at least predominantly fetal cells (referred to as a “fetal cell population”), or, in other embodiments, contains at least predominantly maternal cells (a “maternal cell population”). In certain embodiments, the aforementioned medium contains less than 4%; less than 3%; less than 2%; less than 1%; less than 0.5%; less than 0.3%; less than 0.2%; or less than 0.1% animal serum. In other embodiments, the medium does not contain animal serum. In other embodiments, the medium is a defined medium to which no serum has been added. Low-serum and serum-free media are collectively referred to as “serum-deficient medium/media”.

[0090] Those skilled in the art will appreciate that reference herein to animal serum includes serum from any species, provided that the serum stimulates expansion of the ASC population, for example human serum, bovine serum (e.g. fetal bovine serum and calf bovine serum), equine serum, goat serum, and porcine serum.

[0091] In other embodiments, the described cell populations are produced by a process comprising: a. incubating the ASC population in a first medium, wherein the first medium contains less than 5% animal serum, thereby obtaining a first expanded cell population; and b. incubating the first expanded cell population in a second medium, wherein the second medium also contains less than 5% animal serum, and wherein one or more activating components are added to the second medium. This second medium can also be referred to herein as an activating medium. In other embodiments, the first medium or the second medium, or in other embodiments both the first and second medium, is/are serum free. In still other embodiments, the first medium contains a first basal medium, with the addition of one or more growth factors, collective referred to as the “first expansion medium” (to which a small concentration of animal serum is optionally added); and the activating medium contains a second basal medium with the addition of one or more growth factors (the “second expansion medium”), to which activating component(s) are added. In more specific embodiments, the second expansion medium is identical to the first expansion medium; while in other embodiments, the second expansion medium differs from the first expansion medium in one or more components.

[0092] In certain embodiments, the aforementioned step of incubating the ASC population in a first medium is performed for at least 17 doublings, or in other embodiments at least 6, 8, 12, 15, or at least 18 doublings; or 12-30, 12-25, 15-30, 15-25, 16-25, 17-25, or 18-25 doublings.

[0093] In other embodiments, the ASC population is incubated in the second medium for a defined number of days, for example 4-10, 5-10, 6-10, 4-9, 4-8, 4-7, 5-9, 5-8, 5-7, 6-10, 6-9, or 6-8; or a defined number of population doublings, for example at least 3, at least 4, at least 5, at least 6, 3-10, 3-9, 3-8, 4-10, 4-9, or 4-8. The cells are then subjected to additional culturing in the second medium in a bioreactor. In some embodiments, the bioreactor culturing is performed for at least 4, at least 5, at least 6, at least 7, at least 8, at least 9, 4-10, 4-9, 4-8, 5-10, 5-9, 5-8, 6-10, 6-9, or 6-8 population doublings; or, in other embodiments, for at least 4, at least 5, at least 6, at least 7, 4-15, 4-12, 4-10, 4-9, 4-8, 4-7, 4-15, 5-12, 5-10, 5-9, 5-8, 5-7, 6-15, 6-12, 6-10, 6-9, 6-8, or 6-7 days. In certain embodiments, the bioreactor contains 3D carriers, on which the cells are cultured.

[0094] In still other embodiments, ASC are extracted from placenta into serum-containing medium. A non-limiting extraction protocol is described in Example 1 of International Patent Application WO 2016/098061, in the name of Esther Lukasiewicz Hagai et al., published on Jun. 23, 2016, which is incorporated herein by reference in its entirety. Following initial extractions, cells are, in further embodiments, expanded in SRM. For such embodiments, the nomenclature of the aforementioned steps is retained, with the first medium (serum-replacement medium or SRM) called the “first medium”, and the activating medium called the “second [or activating] medium”.

[0095] In certain embodiments, the described serum-deficient medium is supplemented with factors intended to stimulate cell expansion in the absence of serum. Such medium is referred to herein as serum-replacement medium or SRM, and its use, for example in cell culture and expansion, is known in the art, and is described, for example, in Kinzebach et al. In still other embodiments, a chemically-defined medium is utilized.

[0096] In certain embodiments, the described SRM comprises bFGF (basic fibroblast growth factor, also referred to as FGF-2), TGF-β (TGF-β, including all isotypes, for example TGFβ1, TGFβ2, and TGFβ3), or a combination thereof. In other embodiments, the SRM comprises bFGF, TGF-β, and PDGF. In still other embodiments, the SRM comprises bFGF and TGF-β, and lacks PDGF-BB. Alternatively or in addition, insulin is also present. In still other embodiments, an additional component selected from ascorbic acid, hydrocortisone and fetuin is present; 2 components selected from ascorbic acid, hydrocortisone and fetuin are present; or ascorbic acid, hydrocortisone and fetuin are all present.

[0097] Other SFM and SRM embodiments are disclosed in international patent application publ. no. WO 2019/186471, filed on Mar. 28, 2019, in the name of Lior Raviv et al., which is incorporated herein by reference.

### Other Embodiments of Placenta-Derived ASC

[0098] In certain embodiments, the described ASC are plastic adherent under standard culture conditions, express the surface molecules CD105, CD73 and CD90, and do not express CD45, CD34, CD14 or CD11 b, CD79α, CD19 and HLA-DR. As used herein, the phrase plastic adherent refers to cells that are capable of attaching to a plastic attachment substrate and expanding or proliferating on the substrate. In some embodiments, the cells are anchorage dependent, i.e., require attachment to a surface in order to proliferate grow in vitro.

[0099] In still other embodiments, the described placenta-derived ASC (which hereinafter refers to the cells used in the described methods and compositions, or, in other embodiments, cells used to produce CM, that are used in the described methods and compositions) are a mixture of fetal-derived placental ASC (also referred to herein as “fetal ASC” or “fetal cells”) and maternal-derived placental ASC (also referred to herein as “maternal ASC” or “maternal cells”) and contains predominantly maternal cells. In more specific embodiments, the mixture contains at least 80%, at least 81%, 82%, 83%, 84%, 85%, 86%, 87%, 88%, 89%, 90%, 91%, 92%, 93%, 94%, 95%, 96%, 97%, 98%, 99%, 99.1%, 99.2%, 99.3%, 99.4%, 99.5%, 99.6%, 99.7%, 99.8%, 99.9% maternal cells; or contains between 90-99%, 91-99%, 92-99%, 93-99%, 94-99%, 95-99%, 96-99%, 97-99%, 98-99%, 90-99.5%, 91-99.5%, 92-99.5%, 93-99.5%, 94-99.5%, 95-99.5%, 96-99.5%, 97-99.5%, 98-99.5%, 90-99.9%, 91-99.9%, 92-99.9%, 93-99.9%, 94-99.9%, 95-99.9%, 96-99.9%, 97-99.9%, 98-99.9% % maternal cells.

[0100] In yet other embodiments, the described cells are predominantly or completely maternal cell preparations, or are predominantly or completely fetal cell preparations, each of which represents a separate embodiment. Predominantly or completely maternal cell preparations may be obtained by methods known to those skilled in the art, including the protocol detailed in Example 1 and the protocols detailed in PCT Publ. Nos. WO 2007/108003, WO 2009/037690, WO 2009/144720, WO 2010/026575, WO 2011/064669, and WO 2011/132087. The contents of each of these publications are incorporated herein by reference. Predominantly or completely fetal cell preparations may be obtained by methods known to those skilled in the art, including selecting fetal cells via their markers (e.g., a Y chromosome in the case of a male fetus), and expanding the cells. In certain embodiments, maternal cell populations are used in the described methods and compositions. In other embodiments, fetal cells are used.

[0101] In other embodiments, the described cells are a population that does not contain a detectable amount of maternal cells and is thus entirely fetal cells. A detectable amount refers to an amount of cells detectable by FACS, using markers or combinations of markers present on maternal cells but not fetal cells, as described herein. In certain embodiments, “a detectable amount” may refer to at least 0.1%, at least 0.2%, at least 0.3%, at least 0.4%, at least 0.5%, at least 0.6%, at least 0.7%, at least 0.8%, at least 0.9%, or at least 1%.

[0102] In still other embodiments, the preparation is a mixture of fetal and maternal cells and is enriched for fetal cells. In more specific embodiments, the mixture contains at least 70% fetal cells. In more specific embodiments, at least about 30%, 35%, 40%, 45%, 50%, 55%, 60%, 65%, 75%, 80%, 85%, 90%, 95%, 96%, 97%, 98%, or 99% of the cells are fetal cells. Expression of CD200, as measured by flow cytometry, using an isotype control to define negative expression, can be used as a marker of fetal cells under some conditions. In yet other embodiments, at least 60%, 65%, 70%, 75%, 80%, 85%, 90%, 92%, 95%, 96%, 97%, 98%, 99%, or 99.5% of the described cells are fetal cells.

[0103] In more specific embodiments, the mixture contains 20-80% fetal cells; 30-80% fetal cells; 40-80% fetal cells; 50-80% fetal cells; 60-80% fetal cells; 20-90% fetal cells; 30-90% fetal cells; 40-90% fetal cells; 50-90% fetal cells; 60-90% fetal cells; 20-80% maternal cells; 30-80% maternal cells; 40-80% maternal cells; 50-80% maternal cells; 60-80% maternal cells; 20-90% maternal cells; 30-90% maternal cells; 40-90% maternal cells; 50-90% maternal cells; or 60-90% maternal cells.

[0104] In certain embodiments, the described ASC are distinguishable from human mesenchymal stromal cells (MSC)—which may, e.g., be isolated from bone marrow—as defined by The Mesenchymal and Tissue Stem Cell Committee of the ISCT (Dominici et al., 2006), based on the following 3 criteria: 1. Plastic-adherence when maintained in standard culture conditions (a minimal essential medium +20% fetal bovine serum (FBS)). 2. Expression of the surface molecules CD105, CD73 and CD90, and lack of expression of CD45, CD34, CD14 or CD11b, CD79α or CD19 and HLA-DR. 3. Ability to differentiate into osteoblasts, adipocytes and chondroblasts in vitro. By contrast, the described placental ASC are, in certain embodiments, characterized by a reduced differentiation potential, as exemplified and described further herein.

### Surface Markers and Additional Characteristics of ASC

[0105] Alternatively or additionally, the described ASC (which are used in the described methods and compositions, or to produce CM) may express a marker or a collection of markers (e.g. surface marker) characteristic of MSC or mesenchymal-like stromal cells. In some embodiments, the ASC express some or all of the following markers: CD105 (UniProtKB Accession No. P17813), CD29 (Accession No. P05556), CD44 (Accession No. P16070), CD73 (Accession No. P21589), and CD90 (Accession No. P04216). In some embodiments, the ASC do not express some or all of the following markers: CD3 (e.g. Accession Nos. P09693 [gamma chain] P04234 [delta chain], P07766 [epsilon chain], and P20963 [zeta chain]), CD4 (Accession No. P01730), CD11b (Accession No. P11215), CD14 (Accession No. P08571), CD19 (Accession No. P15391), and/or CD34 (Accession No. P28906). In more specific embodiments, the ASC also lack expression of CD5 (Accession No. P06127), CD20 (Accession No. P11836), CD45 (Accession No. P08575), CD79-alpha (Accession No. B5QTD1), CD80 (Accession No. P33681), and/or HLA-DR (e.g. Accession Nos. P04233 [gamma chain], P01903 [alpha chain], and P01911 [beta chain]). The aforementioned, non-limiting marker expression patterns were found in certain maternal placental cell populations that were expanded on 3D substrates. All UniProtKB entries mentioned in this paragraph were accessed on Jul. 7, 2014. Those skilled in the art will appreciate that the presence of complex antigens such as CD3 and HLA-DR may be detected by antibodies recognizing any of their component parts, such as, but not limited to, those described herein.

[0106] In some embodiments, the ASC possess a marker phenotype that is distinct from bone marrow-mesenchymal stem cells (BM-MSC). In certain embodiments, the ASC are positive for expression of CD10 (which occurs, in some embodiments, in both maternal and fetal ASC); are positive for expression of CD49d (which occurs, in some embodiments, at least in maternal ASC); are positive for expression of CD54 (which occurs, in some embodiments, in both maternal and fetal ASC); are bimodal, or in other embodiments positive, for expression of CD56 (which occurs, in some embodiments, in maternal ASC); and/or are negative for expression of CD106. Except where indicated otherwise, bimodal refers to a situation where a significant percentage (e.g., at least 20%) of a population of cells express a marker of interest, and a significant percentage do not express the marker.

[0107] “Positive” expression of a marker indicates a value higher than the range of the main peak of an isotype control histogram; this term is synonymous herein with characterizing a cell as “express”/“expressing” a marker. “Negative” expression of a marker indicates a value falling within the range of the main peak of an isotype control histogram; this term is synonymous herein with characterizing a cell as “not express”/“not expressing” a marker. “High” expression of a marker, and term “highly express[es]” indicates an expression level that is more than 2 standard deviations higher than the expression peak of an isotype control histogram, or a bell-shaped curve matched to said isotype control histogram.

[0108] A cell is said to express a protein or factor if the presence of protein or factor is detectable by standard methods, an example of which is a detectable signal using fluorescence-activated cell sorting (FACS), relative to an isotype control. Reference herein to “secrete”/“secreting”/“secretion” relates to a detectable secretion of the indicated factor, above background levels in standard assays. For example, 0.5×10⁶ fetal or maternal ASC can be suspended in 4 ml medium (DMEM+10% FBS+2 mM L-Glutamine), added to each well of a 6 well-plate, and cultured for 24 hrs. in a humidified incubator (5% CO₂, at 37° C.). After 24 h, DMEM is removed, and cells are cultured for an additional 24 hrs in 1 ml RPMI 1640 medium+2 mM L-Glutamine+0.5% HSA. The CM is collected from the plate, and cell debris is removed by centrifugation.

[0109] According to some embodiments, the described ASC are capable of suppressing an immune reaction in the subject. Methods of determining the immunosuppressive capability of a cell population are well known to those skilled in the art, with exemplary methods described in Example 3 of PCT Publication No. WO 2009/144720, which is incorporated herein by reference in its entirety. For example, in an exemplary, non-limiting mixed lymphocyte reaction (MLR) assay, irradiated cord blood (iCB) cells, for example human cells or cells from another species, are incubated with peripheral blood-derived monocytes (PBMC; e.g., human PBMC or PBMC from another species), in the presence or absence of a cell population to be tested. PBMC cell replication, which correlates with the intensity of the immune response, can be measured by a variety of methods known in the art, for example by ³H-thymidine uptake. Reduction of the PBMC cell replication when co-incubated with test cells indicates an immunosuppressive capability. Alternatively, a similar assay can be performed with peripheral blood (PB)-derived MNC, in place of CB cells. Alternatively or in addition, secretion of pro-inflammatory and anti-inflammatory cytokines by blood cell populations (such as CB cells or PBMC) can be measured when stimulated (for example by incubation with non-matched cells, or with a non-specific stimulant such as PHA), in the presence or absence of the ASC. In certain embodiments, for example in the case of human ASC, as provided in WO 2009/144720, when 150,000 ASC are co-incubated for 48 hours with 50,000 allogeneic PBMC, followed by a 5-hour stimulation with 1.5 mcg/ml of LPS, the amount of IL-10 secretion by the PBMC is at least 120%, at least 130%, at least 150%, at least 170%, at least 200%, or at least 300% of the amount observed with LPS stimulation in the absence of ASC.

[0110] In still other embodiments, the ASC secrete immunoregulatory factor(s). In certain embodiments, the ASC secrete a factor selected from TNF-beta (UniProt identifier P01374) and Leukemia inhibitory factor (LIF; UniProt identifier P15018). In other embodiments, ASC secrete a factor selected from MCP-1 (CCL2), Osteoprotegerin, MIF (Macrophage migration inhibitory factor; Accession No. P14174), GDF-15, SDF-1 alpha, GROa (Growth-regulated alpha protein; Accession No. P09341), beta2-Microglobulin, IL-6, IL-8 (UniProt identifier P10145), TNF-beta, ENA78/CXCL5, eotaxin/CCL11 (Accession No. P51671), and MCP-3 (CCL7). In certain embodiments, the ASC secrete MCP-1, Osteoprotegerin, MIF, GDF-15, SDF-1 alpha, GROa, beta2-Microglobulin, IL-6, IL-8, TNF-beta, and MCP-3, which were found to be secreted by maternal cells. In other embodiments, the ASC secrete MCP-1, Osteoprotegerin, MIF, GDF-15, SDF-1 alpha, beta2-Microglobulin, IL-6, IL-8, ENA78, eotaxin, and MCP-3, which were found to be secreted by fetal cells. UniProt entries in this paragraph were accessed on Mar. 23, 2017.

[0111] In yet other embodiments, the ASC secrete anti-fibrotic factor(s). In certain embodiments, the ASC secrete a factor selected from Serpin E1 (Plasminogen activator inhibitor 1; Uniprot Accession No. P05121) and uPAR (Urokinase plasminogen activator surface receptor; Uniprot Accession No. Q03405). In other embodiments, the ASC secrete factors that facilitate. In still other embodiments, the ASC secrete Serpin E1 and uPAR, which were found to be secreted by maternal and fetal cells. All UniProt entries in this paragraph were accessed on Apr. 3, 2017.

[0112] In other embodiments, the ASC secrete a factor(s) that promotes extracellular matrix (ECM) remodeling. In certain embodiments, the ASC secrete a factor selected from TIMP1, TIMP2, MMP-1, MMP-2, and MMP-10. In other embodiments, the ASC secrete TIMP1, TIMP2, MMP-1, MMP-2, and MMP-10, which were found to be secreted by maternal cells. In still other embodiments, the ASC secrete TIMP1, TIMP2, MMP-1, and MMP-10, which were found to be secreted by fetal cells.

[0113] In general, in certain embodiments, the described ASC exhibit a spindle shape when cultured under 2D conditions, or more specifically, are spindle in shape, with a flat, polygonal morphology, and are 15-19 μM in diameter. Alternatively or in addition, at least 90% of the cells are Oct-4 minus, as assessed by FACS. In certain embodiments, further steps of purification or enrichment for ASC may be performed. Such methods include, but are not limited to, FACS using ASC marker expression. In other embodiments, the described cells have not been subject to any type of cell sorting in the process used to isolate them. Cell sorting, in this context, refers to any a procedure, whether manual, automated, etc., that selects cells on the basis of their expression of one or more markers, their lack of expression of one or more markers, or a combination thereof. Those skilled in the art will appreciate that data from one or more markers can be used individually or in combination in the sorting process.

[0114] Alternatively or in addition, the ASC (a) have a Population Doubling Level (PDL) of no more than 25; (b) stimulate endothelial cell proliferation and/or bone marrow migration in in vitro assays (for example, as described herein); (c) secrete, in various embodiments, at least 1, at least 2, at least 3, at least 4, at least 5, at least 6, or all 7 of IL-10, VEGF, Angiogenin, Osteopontin, IL-6, IL-8, MCP-1; (d) exhibit normal karyotype; (e) exhibit expression (in various embodiments, in at least 80%, 85%, 90%, 93%, 95%, 97%, or 98% of the cells) of CD105, CD73, CD29, and CD90; (f) exhibit lack of expression (in various embodiments, in at least 90%, 93%, 95%, 97%, 98%, 99%, 99.5%, 99.7%, or 99.75% of the cells) of CD14, CD19, CD31, CD34, CD45, HLA-DR, and CD235; or any combination of 2 or more of characteristics a-f, each of which represents a separate embodiment. Alternatively or in addition, less than 5%, less than 10%, less than 20%, less than 30%, less than 40%, less than 50%, more than 60%, more than 70%, more than 80%, more than 90%, or more than 95% of the cells express CD200. These possibilities may be independently combined with characteristics a-f and combinations thereof, each of which represents a separate embodiment.

[0115] In other embodiments, each of CD29, CD73, CD90, and CD105 is expressed by more than 80% of the ASC in each of the populations; and over 90% (or in other embodiments, over 95%, or over 98%) of the cells in each population are resistant to osteogenesis, as described in WO 2016/098061, which is incorporated herein by reference. In some embodiments, differentiation into osteocytes is assessed by incubation for 17 days with a solution containing 0.1 mcM dexamethasone, 0.2 mM ascorbic acid, and 10 mM glycerol-2-phosphate, in plates coated with vitronectin and collagen (standard osteogenesis induction conditions). In yet other embodiments, each of CD34, CD39, and CD106 is expressed by less than 10% of the cells; less than 20% of the cells highly express CD56; and the cells do not differentiate into osteocytes, after incubation under the standard conditions. In other embodiments, each of CD29, CD73, CD90, and CD105 is expressed by more than 90% of the cells, each of CD34, CD39, and CD106 is expressed by less than 5% of the cells; less than 20%, 15%, or 10% of the cells highly express CD56, and/or the cells do not differentiate into osteocytes, after incubation under the standard conditions. In still other embodiments, the conditions are incubation for 26 days with a solution containing 10 mcM dexamethasone, 0.2 mM ascorbic acid, 10 mM glycerol-2-phosphate, and 10 nM Vitamin D, in plates coated with vitronectin and collagen (modified osteogenesis induction conditions). The aforementioned solutions will typically contain cell culture medium such as DMEM+10% serum or the like, as will be appreciated by those skilled in the art. In yet other embodiments, less than 20%, 15%, or 10% of the described cells highly express CD56. In various embodiments, the cell population may be less than 50%, 40%, 30%, 20%, 10%, or 5% positive for CD200. In other embodiments, the cell population is more than 50%, 60%, 70%, 80%, 90%, 95%, 97%, 98%, 99%, or 99.5% positive for CD200. In certain embodiments, greater than 50% of the cells highly express CD141, or in other embodiments SSEA4, or in other embodiments both markers. In other embodiments, the cells highly express CD141. Alternatively or in addition, greater than 50% of the cells express HLA-A2. The aforementioned, non-limiting phenotypes and marker expression patterns were found in certain fetal tissue-derived placental cell populations that were expanded on 3D substrates, as provided herein.

[0116] In other embodiments, each of CD29, CD73, CD90, and CD105 is expressed by more than 80% of each of the ASC populations; and over 90% (or in other embodiments, over 95%, or over 98%) of the cells in each population are resistant to adipogenesis, as described in WO 2016/098061, which is incorporated herein by reference. In some embodiments, differentiation into adipocytes is assessed by incubation in adipogenesis induction medium, i.e., a solution containing 1 mcM dexamethasone, 0.5 mM 3-Isobutyl-1-methylxanthine (IBMX), 10 mcg/ml insulin, and 100 mcM indomethacin, on days 1, 3, 5, 9, 11, 13, 17, 19, and 21; and replacement of the medium with adipogenesis maintenance medium, namely a solution containing 10 mcg/ml insulin, on days 7 and 15, for a total of 25 days (standard adipogenesis induction conditions). In yet other embodiments, each of CD34, CD39, and CD106 is expressed by less than 10% of the cells; less than 20% of the cells highly express CD56; and the cells do not differentiate into adipocytes, after incubation under the standard conditions. In other embodiments, each of CD29, CD73, CD90, and CD105 is expressed by more than 90% of the cells, each of CD34, CD39, and CD106 is expressed by less than 5% of the cells; less than 20%, 15%, or 10% of the cells highly express CD56; and the cells do not differentiate into adipocytes, under the standard conditions. In still other embodiments, a modified adipogenesis induction medium, containing 1 mcM dexamethasone, 0.5 mM IBMX, 10 mcg/ml insulin, and 200 mcM indomethacin is used, and the incubation is for a total of 26 days (modified adipogenic conditions). In still other embodiments, over 90% of the cells in each population do not differentiate into either adipocytes or osteocytes under the aforementioned standard conditions. In yet other embodiments, over 90% of the cells in each population do not differentiate into either adipocytes or osteocytes under the modified conditions. The aforementioned solutions will typically contain cell culture medium such as DMEM +10% serum or the like, as will be appreciated by those skilled in the art. In various embodiments, the cell population may be less than 50%, less than 40%, less than 30%, less than 20%, or less than 10%, or less than 5% positive for CD200. In other embodiments, the cell population is more than 50%, 60%, 70%, 80%, 90%, 95%, 97%, 98%, 99%, or 99.5% positive for CD200. In certain embodiments, greater than 50% of the cells highly express CD141, or in other embodiments SSEA4, or in other embodiments both markers. In other embodiments, the cells highly express CD141. Alternatively or in addition, greater than 50% of the cells express HLA-A2. The aforementioned, non-limiting phenotypes and marker expression patterns were found in certain fetal tissue-derived placental cell populations that were expanded on 3D substrates.

[0117] In still other embodiments, the described ASC possess any other marker phenotype, other characteristic (e.g. secretion of factor(s), differentiation capability, resistance to differentiation, inhibition of T-cell proliferation, or stimulation of myoblast proliferation), or combination thereof that is mentioned and/or described in international patent application publ. no. WO 2019/239295, filed Jun. 10, 2019, to Zami Aberman et al, which is incorporated herein by reference.

[0118] In still other embodiments, the cells may be allogeneic, or in other embodiments, the cells may be autologous. In other embodiments, the cells may be fresh or, in other embodiments, frozen (for example, cryo-preserved).

[0119] In certain embodiments, any of the aforementioned ASC populations are used in the described methods and compositions. In other embodiments, CM obtained from the cells are used in the described methods and compositions. Each population may be freely combined with each of the described treatments, and each combination represents a separate embodiment. Furthermore, the cells utilized to generate CM or contained in the composition can be, in various embodiments, autologous, allogeneic, or xenogenic to the treated subject. Each type of cell may be freely combined with the therapeutic embodiments mentioned herein.

### Additional Method Characteristics for Preparation of ASC and CM Derived Therefrom

[0120] In some embodiments, the described placental ASC have been incubated in a 3D bioreactor. Each described embodiment for cell expansion may be combined with any of the described embodiments for therapeutic uses of ASC and CM derived therefrom.

[0121] In some embodiments, the described ASC or CM are/is harvested from a 3D bioreactor in which the ASC have been incubated. Alternatively or in addition, the cells are cryopreserved, and then are thawed, after which the cells are further expanded and/or CM are isolated therefrom. In other embodiments, after thawing, the cells are cultured in 2D culture, from which the ASC are isolated.

[0122] In certain embodiments, the described ASC are, or have been, subject to a 3D incubation, as described further herein. In more specific embodiments, the ASC have been incubated in a 2D adherent-cell culture apparatus, prior to the step of 3D culturing.

[0123] The terms “two-dimensional culture” and “2D culture” refer to a culture in which the cells are exposed to conditions that are compatible with cell growth and allow the cells to grow in a monolayer. An apparatus suitable for such growth is referred to as a “2D culture apparatus”. Such apparatuses will typically have flat growth surfaces (also referred to as a “two-dimensional substrate(s)” or “2D substrate(s)”), in some embodiments comprising an adherent material, which may be flat or curved. Non-limiting examples of apparatuses for 2D culture are cell culture dishes and plates. Included in this definition are multi-layer trays, such as Cell Factory™, manufactured by Nunc™, provided that each layer supports monolayer culture. It will be appreciated that even in 2D apparatuses, cells can grow over one another when allowed to become over-confluent. This does not affect the classification of the apparatus as “two-dimensional”.

[0124] The terms “three-dimensional culture” and “3D culture” refer to a culture in which the cells are exposed to conditions that are compatible with cell growth and allow the cells to grow in a 3D orientation relative to one another. The term “three-dimensional [or 3D] culture apparatus” refers to an apparatus for culturing cells under conditions that are compatible with cell growth and allow the cells to grow in a 3D orientation relative to one another. Such apparatuses will typically have a 3D growth surface (also referred to as a “three-dimensional substrate” or “3D substrate”), in some embodiments comprising an adherent material, which is present in the 3D culture apparatus, e.g. the bioreactor. Certain, non-limiting embodiments of 3D culturing conditions suitable for expansion of adherent stromal cells are described in PCT Application Publ. No. WO/2007/108003, which is fully incorporated herein by reference in its entirety.

[0125] In various embodiments, “an adherent material” refers to a material that is synthetic, or in other embodiments naturally occurring, or in other embodiments a combination thereof. In certain embodiments, the material is non-cytotoxic (or, in other embodiments, is biologically compatible). Alternatively or in addition, the material is fibrous, which may be, in more specific embodiments, a woven fibrous matrix, a non-woven fibrous matrix, or any type of fibrous matrix.

[0126] In still other embodiments, the described ASC are, or have been, subject to culturing conditions (e.g,. a growth substate, incubation time, bioreactor, seeding density, or harvest density) mentioned in international patent application publ. no. WO 2019/239295, filed Jun. 10, 2019, to Zami Aberman et al, which is incorporated herein by reference.

[0127] In other embodiments, the length of 3D culturing is at least 4 days; between 4-12 days; in other embodiments between 4-11 days; 4-10 days; 4-9 days; 5-9 days; 5-8 days; 6-8 days; or 5-7 days. In other embodiments, the 3D culturing is performed for 5-15 cell doublings, in other embodiments 5-14, 5-13, 5-12, 5-11, 5-10, 6-15, 6-14, 6-13, 6-12, 6-11, or 6-10 doublings.

[0128] In certain embodiments, 3D culturing can be performed in a 3D bioreactor. In some embodiments, the 3D bioreactor comprises a container for holding medium and a 3D attachment substrate disposed therein, and a control apparatus, for controlling pH, temperature, and oxygen levels and optionally other parameters. The terms attachment substrate and growth substrate are interchangeable.

[0129] An exemplary, non-limiting bioreactor, the Celligen 310 Bioreactor, is depicted in FIG. 1. A Fibrous-Bed Basket (16) is loaded with polyester disks (10). In some embodiments, the vessel is filled with deionized water or isotonic buffer via an external port (1 [this port may also be used, in other embodiments, for cell harvesting]) and then optionally autoclaved. In other embodiments, following sterilization, the liquid is replaced with growth medium, which saturates the disk bed as depicted in (9). In still further embodiments, temperature, pH, dissolved oxygen concentration, etc., are set prior to inoculation. In yet further embodiments, a slow stiffing initial rate is used to promote cell attachment, then agitation is increased. Alternatively or addition, perfusion is initiated by adding fresh medium via an external port (2). If desired, metabolic products may be harvested from the cell-free medium above the basket (8). In some embodiments, rotation of the impeller creates negative pressure in the draft-tube (18), which pulls cell-free effluent from a reservoir (15) through the draft tube, then through an impeller port (19), thus causing medium to circulate (12) uniformly in a continuous loop. In still further embodiments, adjustment of a tube (6) controls the liquid level; an external opening (4) of this tube is used in some embodiments for harvesting. In other embodiments, a ring sparger (not visible), is located inside the impeller aeration chamber (11), for oxygenating the medium flowing through the impeller, via gases added from an external port (3), which may be kept inside a housing (5), and a sparger line (7). Alternatively or in addition, sparged gas confined to the remote chamber is absorbed by the nutrient medium, which washes over the immobilized cells. In still other embodiments, a water jacket (17) is present, with ports for moving the jacket water in (13) and out (14).

[0130] In still other embodiments, the matrix is a plug flow bioreactor which is, in other embodiments, packed with Fibra-cel® carriers (or, in other embodiments, other carriers).

[0131] In other embodiments, prefabricated or rigid scaffolds are utilized. Such scaffolds require, in some embodiments, migration of cells into the scaffold, after cell seeding. In other embodiments, physically crosslinked scaffolds may be utilized, which are, in further embodiments, gels that are formed via reversible changes in pH or temperature.

[0132] In other embodiments, microencapsulation is utilized. In certain embodiments, cells are immobilized within a semi-permeable material, e.g., a membrane that allows the diffusion of nutrients, oxygen, and growth factors essential for cell growth.

[0133] In more particular embodiments, cells may be removed from a 3D matrix while the matrix remains within the bioreactor. In certain embodiments, at least about 10%, 20%, or 30% of the cells are in the S and G2/M phases (collectively), at the time of harvest from the bioreactor.

[0134] In certain embodiments, the harvesting process comprises vibration or agitation, for example as described in PCT International Application Publ. No. WO 2012/140519, which is incorporated herein by reference. In certain embodiments, during harvesting, the cells are agitated at 0.7-6 Hertz, or in other embodiments 1-3 Hertz, during, or in other embodiments during and after, treatment with a protease, optionally also comprising a calcium chelator. In certain embodiments, the carriers containing the cells are agitated at 0.7-6 Hertz, or in other embodiments 1-3 Hertz, while submerged in a solution or medium comprising a protease, optionally also comprising a calcium chelator.

[0135] Those skilled in the art will appreciate that a variety of isotonic buffers may be used for washing cells and similar uses. Hank's Balanced Salt Solution (MSS; Life Technologies) is only one of many buffers that may be used.

[0136] For any preparation used in the described methods, the therapeutically effective amount or dose can be estimated initially from in vitro and cell culture assays. Often, a dose is formulated in an animal model to achieve a desired concentration or titer. Such information can be used to more accurately determine useful doses in humans.

[0137] Effective dosages and schedules for administering the compositions may be determined empirically, and making such determinations is within the skill in the art. The dosage can be adjusted by the individual physician in the event of any counterindications. A typical dosage of the ASC ranges, in some embodiments, from ˜10 million to ˜500 million cells per administration, depending on the factors mentioned above. For example, the dosage of ASC can be 10, 20, 30, 40, 50, 60, 70, 80, 90, 100, 125, 150, 175, 200, 225, 250, 275, 300, 325, 350, 375, 400, 425, 450, 475, or 500 million cells or any amount in between. It is further understood that a range of ASC can be used including from ˜100 to ˜400 million cells, from ˜150 to ˜300 million cells. Accordingly, disclosed herein are therapeutic methods, wherein the dosage of ASC administered to the subject is 10, 20, 30, 40, 50, 60, 70, 80, 90, 100, 125, 150, 175, 200, 225, 250, 275, 300, 325, 350, 375, 400, 425, 450, 475, or 500 million cells or from 150 million-300 million cells. ASC, compositions comprising ASC, and/or medicaments manufactured using said ASC can be administered in a single dose, 2 doses, 3 doses, 2-5 doses, 2-10 doses, 1-10 doses, or 1-3 doses, over a time period of 1, 2, 3-6, 6-12, 2-12, 2-20, 3-20, or 4-20 weeks; or, in other embodiments, 2 3, 4, 5, 6, 7, 8, 9, 10, 11, or 12 months; or, in other embodiments, 1.5, 2, 3, 4, 5 years, or more.

[0138] In certain embodiments, the described pharmaceutical composition contains between 100-600 million ASC, for an adult subject. In other embodiments, the pharmaceutical composition contains between 100-400 million, 100-500 million, 150-600 million, 150-500 million, 150-400 million, 200-600 million, 200-500 million, or 200-400 million ASC, for an adult subject. In still other embodiments, the composition contains between 1.5-6 million ASC per kilogram, e.g., for a pediatric subject. In yet other embodiments, e.g., for a pediatric subject, the composition contains between 1.5-5 million, 1.5-4 million, 2-5 million, 2-4 million, 3-6 million, or 3-5 million ASC per kilogram. In certain embodiments, the administration is intramuscular. The exact formulation, route of administration and dosage can be, in some embodiments, chosen by the individual physician in view of the patient's condition.

[0139] Depending on the severity and responsiveness of the condition to be treated, dosing can be of a single or, in other embodiments, a plurality of administrations, with a course of treatment lasting from 2 days to 3 weeks or, in other embodiments, from 3 weeks to 3 months, or, in other embodiments, until alleviation of the disease state is achieved.

[0140] In certain embodiments, following administration, the majority of the cells, in other embodiments more than 60%, more than 70%, more than 80%, more than 90%, more than 95%, more than 96%, more than 97%, more than 98%, or more than 99% of the cells are no longer detectable within the subject 1 month after administration.

### Formulations

[0141] In some embodiments, the described composition is an injectable composition that is manufactured by adding 1 or more excipients, e.g. stabilizers and aqueous buffers, to placental ASC or CM thereof.

[0142] In other embodiments, the ASC are washed to remove serum present therewith. In more specific embodiments, xenogenic serum components are reduced by at least 90%, 95%, 99%, 99.5%, 99.8%, or 99.9%; or, in other embodiments, are undetectable by standard methods, e.g. mass spectrometry.

### Pharmaceutical Carriers

[0143] In certain embodiments, the described compositions comprise one or more pharmaceutically acceptable carriers. Herein, the term “pharmaceutically acceptable carrier” refers to a carrier or a diluent. In some embodiments, a pharmaceutically acceptable carrier does not cause significant irritation to a subject. In some embodiments, a pharmaceutically acceptable carrier does not abrogate the biological activity and properties of administered cells. Examples, without limitations, of carriers are propylene glycol, saline, emulsions, and mixtures of organic solvents with water. In some embodiments, the pharmaceutical carrier is an aqueous solution of saline.

[0144] In other embodiments, the composition further comprises at least one constituent to facilitate formulation, stability, and/or topical application of the composition. In more specific embodiments, the constituent comprises a flow regulating agent, a filler, an excipient, an alcohol, a preservative, a suspending agent, a stabilizer, a surfactant, an oil phase, an aqueous phase, a humectant, or a thickener. In other embodiments, the at least one additional constituent comprises colloidal silica, titanium dioxide, isopropyl alcohol, benzalkonium chloride, stearic acid, cetyl alcohol, isopropyl palmitate, methyparaben, propylparaben, sorbitan monostearate, sorbitol, polysorbate, milk, coconut oil, almond oil, lanolin, lecithin, or beeswax. In other embodiments, the described composition is a gel. In other embodiments, the composition is a lotion.

[0145] In still other embodiments, the composition comprises placental ASC in combination with an excipient selected from an osmoprotectant or cryoprotectant, an agent that protects cells from the damaging effect of freezing and ice formation. In certain embodiments, the cryoprotectant is a permeating compound, non-limiting examples of which are dimethyl sulfoxide (DMSO), glycerol, ethylene glycol, formamide, propanediol, poly-ethylene glycol, acetamide, propylene glycol, and adonitol; or may in other embodiments be a non-permeating compound, non-limiting examples of which are lactose, raffinose, sucrose, trehalose, and d-mannitol. In other embodiments, both a permeating cryoprotectant and a non-permeating cryoprotectant are present. In other embodiments, the excipient is a carrier protein, a non-limiting example of which is albumin In still other embodiments, both an osmoprotectant and a carrier protein are present; in certain embodiments, the osmoprotectant and carrier protein may be the same compound. Alternatively or in addition, the composition is frozen. The cells may be any embodiment of ASC mentioned herein, each of which represents a separate embodiment. In more specific embodiments, DMSO is present at a concentration of 2-5%; or, in other embodiments, 5-10%; or, in other embodiments, 2-10%, 3-5%, 4-6%; 5-7%, 6-8%, 7-9%, 8-10%. DMSO, in other embodiments, is present with a carrier protein, a non-limiting example of which is albumin, e.g. human serum albumin (HSA). In certain embodiments, HSA is present at 2-10%, 3-10%, 4-10%, 5-10%, 2-9%, 2-8%, 3-7%, 4-6%, 4.5-5.5%, or 5% (weight per volume). In still other embodiments, DMSO and HSA are both present in a saline solution (a non-limiting example of which is Plasma-Lyte® A (commercially available from Baxter).

[0146] In other embodiments, for injection, the described ASC or other active ingredients may be formulated in aqueous solutions, e.g. in a physiologically compatible buffer, non-limiting examples of which are Hank's solution, Ringer's solution, and a physiological salt buffer.

### Routes

[0147] In certain embodiments, the described pharmaceutical compositions are administered intramuscularly. In other embodiments, the composition is administered systemically. Alternatively, the composition is administered locally, for example, via injection of the pharmaceutical composition directly into an exposed or affected tissue region of a patient. In other embodiments, the composition is administered intravenously (IV), subcutaneously (SC), or intraperitoneally (IP), each of which is considered a separate embodiment. In this regard, “intramuscular” administration refers to administration into the muscle tissue of a subject; “subcutaneous” to administration just below the skin; “intravenous” to administration into a vein of a subject; and “intraperitoneal” refers to administration into the peritoneum of a subject. In still other embodiments, the cells are administered intratracheally, intrathecally, by inhalation, or intranasally. In certain embodiments, lung-targeting routes of administration are used. In certain embodiments, such routes utilize cells encapsulated in liposomes (or, in some embodiments, other physical barriers) to reduce entrapment within the lungs.

[0148] In various embodiments, the described ASC are administered to the subject within 1, 2, 3, 4, 6, 8, 10, 12, 15, 18, 24, 30, 36, or 48 hours; or within 3, 4, 5, 6, 8, 10, 12, or 20 days of diagnosis (or, in other embodiments, onset) of any of the herein-described conditions (each of which represents a separate embodiment.). In more specific embodiments, the described compositions are administered 1-24, 2-24, 3-24, 4-24, 5-24, 6-24, 8-24, 10-24, 12-48, 1-48, 2-48, 3-48, 4-48, 5-48, 6-48, 8-48, 10-48, 12-48, 18-48, 24-48, 1-72, 2-72, 3-72, 4-72, 5-72, 6-72, 8-72, 10-72, 12-72, 18-72, 24-72, or 36-72 hours after onset of any of the herein-described conditions. In still other embodiments, the described compositions are administered 3-48, 4-48, 5-48, or 6-48 hours after an onset of any of the herein-described conditions.

[0149] In various embodiments, engraftment of the described cells in the host is not required for the cells to exert the described therapeutic effects, each of which is considered a separate embodiment. In other embodiments, engraftment is required for the cells to exert the effect(s). For example, the cells may, in various embodiments, be able to exert a therapeutic effect, without themselves surviving for more than 3 days, more than 4 days, more than 5 days, more than 6 days, more than 7 days, more than 8 days, more than 9 days, more than 10 days, or more than 14 days after administration.

[0150] Compositions including the described preparations formulated in a compatible pharmaceutical carrier may also be prepared, placed in an appropriate container, and labeled for treatment of an indicated condition.

[0151] It is clarified that each embodiment of the described ASC or CM may be freely combined with each embodiment relating to a therapeutic method or pharmaceutical composition.

### Subjects

[0152] In certain embodiments, the subject treated by the described methods and compositions is a human In certain embodiments, the subject has a viral infection. In still other embodiments, the subject has ARDS, pulmonary hypertension, lung fibrosis, acute kidney injury, gastrointestinal injury, or another complication of a viral infection. In some embodiments, the subject is male. In other embodiments, the subject is female. In some embodiments, the subject is at increased risk of complications of COVID-19. In certain embodiments, the subject is an elderly subject, for example a subject over 75, or in other embodiments, over 65, over 70, 75, over 80, 70-85, 75-85, or 75-90 years in age. In other embodiments, the subject has asthma. In still other embodiments, the subject has chronic lung disease. In yet other embodiments, the subject has heart disease. In yet other embodiments, the subject is immunocompromised. In yet other embodiments, the subject has chronic kidney disease and/or is undergoing dialysis. In yet other embodiments, the subject has liver disease. In other embodiments, the subject is severely obese (e.g., has a body mass index [BMI] of 40 or higher). In other embodiments, the subject has hypercytokinemia, SIRS, or another type of hyperactive immune response.

[0153] In yet other embodiments, the subject is a pediatric subject, for example a subject under 18, under 15, under 12, under 10, under 8, under 6, under 5, under 4, under 3, or under 2 years, or under 18, 15, 12, 10, 8, 6, 5, 4, 3, 2, or 1 month in age; or is an adult subject, for example ages 18-60, 18-55, 18-50, 20-60, 20-55, 20-50, 20-45, 20-40, 20-35, 20-30, 25-60, 30-60, 40-60, or 50-60.

[0154] In other embodiments, the subject is an animal. In some embodiments, treated animals include domesticated animals and laboratory animals, e.g., non-mammals and mammals, for example non-human primates, rodents, pigs, dogs, and cats. In certain embodiments, the subject is administered with additional therapeutic agents or cells.

### Sequential Administration of ASC from Multiple Donors

[0155] In certain embodiments, the subject is administered: (a) a first pharmaceutical composition, comprising allogeneic placental ASC from a first donor; and subsequently (b) a second pharmaceutical composition comprising allogeneic placental ASC from a second donor, wherein the second donor differs from the first donor in at least one allele group of HLA-A or HLA-B.

[0156] In certain embodiments, each of the pharmaceutical compositions contains between 100-600 million ASC, for an adult subject. In other embodiments, the pharmaceutical compositions each contain between 100-400 million, 100-500 million, 150-600 million, 150-500 million, 150-400 million, 200-600 million, 200-500 million, or 200-400 million ASC, for an adult subject. In still other embodiments, the compositions each contain between 1.5-6 million ASC per kilogram, e.g., for a pediatric subject. In yet other embodiments, e.g., for a pediatric subject, the compositions each contain between 1.5-5 million, 1.5-4 million, 2-5 million, 2-4 million, 3-6 million, or 3-5 million ASC per kilogram. In certain embodiments, the administration is intramuscular.

[0157] Reference to ASC “from” or “derived from” a donor is intended to encompass cells removed from or otherwise obtained from the donor, followed by optional steps of ex-vivo cell culture, expansion, and/or other treatments to improve the therapeutic efficacy of the cells; and/or combination with pharmaceutical excipients. Those skilled in the art will appreciate that the aforementioned optional steps will not alter the HLA genotype of the ASC, absent intentional modification of the HLA genotype (e.g., using CRISPR-mediating editing or the like). Cell populations with an intentionally modified HLA genotype are not intended to be encompassed. ASC populations that contain a mixture of cells from more than one donor are also not intended to be encompassed.

[0158] Reference to a second donor “differ/differs/differing” from a first donor in at least one allele group of HLA-A or HLA-B denotes that the DNA of the second donor comprises at least one HLA-A or HLA-B allele belonging to an allele group not represented in the alleles of the first donor. (Typically [except in the case of a homozygous first donor], the DNA of the first donor will also comprise at least one HLA-A or HLA-B allele belonging to an allele group not represented in the alleles of the second donor). Similarly, a second donor “differs from” a first donor in at least one allele supertype if the DNA of the second donor comprises at least one HLA-A or HLA-B allele belonging to a supertype not represented in the alleles of the first donor. These terms are intended to be used analogously in various contexts herein, except where indicated otherwise.

[0159] In other embodiments, the second donor in the described therapeutic methods and compositions differs from the first donor in at least one allele group of HLA-A. In still other embodiments, the second donor differs from the first donor in at least one allele group of HLA-B.

[0160] In yet other embodiments, the second donor differs from the first donor in at least two HLA-A allele groups of or, in other embodiments, in at least 2 HLA-B allele groups; or, in other embodiments, at least one allele group of each of HLA-A and HLA-B.

[0161] In other embodiments, the second donor differs from the first donor in at least one HLA-A allele supertype or, in other embodiments, at least one HLA-B allele supertype.

[0162] In still other embodiments, the second donor differs from the first donor in at least two allele supertypes of HLA-A or HLA-B, which may be, in more specific embodiments, an HLA-A allele supertype, an HLA-B allele supertype, or a combination thereof.

[0163] Alternatively or in addition, the second donor differs from the first donor in at least one allele group of HLA-DR, or in other embodiments, in 2 HLA-DR allele groups.

[0164] Further embodiments of dosing regimens are described in WO 2019/239295, in the name of Zami Aberman et al., which is incorporated herein by reference.

[0165] Also disclosed herein are kits and articles of manufacture that are drawn to reagents that can be used in practicing the methods disclosed herein. The kits and articles of manufacture can include any reagent or combination of reagent discussed herein or that would be understood to be required or beneficial in the practice of the disclosed methods, including ASC. In another aspect, the kits and articles of manufacture comprise a label, instructions, and packaging material, for example for treating a disorder or therapeutic indication mentioned herein.

[0166] Additional objects, advantages, and novel features of the invention will become apparent to one ordinarily skilled in the art upon examination of the following examples, which are not intended to be limiting. Additionally, each of the various embodiments and aspects of the invention as delineated hereinabove and as claimed in the claims section below finds experimental support in the following examples.

### EXAMPLES

[0167] Reference is now made to the following examples, which together with the above descriptions illustrate certain embodiments in a non-limiting fashion.

### Example 1: Culturing and Production of Adherent Placental Cells

[0168] Placenta-derived cell populations containing over 90% maternal tissue-derived cells were prepared as described in Example 1 of International Patent Application WO 2016/098061, which is incorporated herein by reference in its entirety. The cell expansion and harvesting process consisted of 3 stages, followed by downstream processing steps: Stage 1, the intermediate cell stock (ICS) production; Stage 2, the thawing of the ICS and initial further culture steps; and Stage 3, additional culture steps, first in tissue culture dishes, and then on Fibra-Cel® carriers in a bioreactor. All steps were performed in the presence of serum-containing medium. The downstream processing steps included harvest from flasks or bioreactor/s, cell concentration, washing, formulation, filling and cryopreservation. The procedure included periodic testing of the growth medium for sterility and contamination, all as described in international patent application publ. no. WO 2019/239295, which is incorporated herein by reference.

### Example 2: Culture oF Placental Cells in Serum-Free Medium

[0169] Methods

[0170] The cell harvesting and expansion process consisted of 3 stages, followed by downstream processing steps: Stage 1, the intermediate cell stock (ICS) production; Stage 2, the thawing of the ICS and initial further culture steps; and Stage 3, additional culture steps, first in tissue culture dishes, and then on Fibra-Cel® carriers in a bioreactor. The downstream processing steps included harvest from flasks or bioreactor/s, cell concentration, washing, formulation, filling and cryopreservation. The procedure included periodic testing of the growth medium for sterility and contamination, all as described in international patent application publ. no. WO 2019/239295, which is incorporated herein by reference. Bone marrow migration assays were also performed as described in WO 2019/239295.

[0171] Results

[0172] Placental cells were extracted and expanded in serum-free (SF) medium for 3 passages. Cell characteristics of eight batches were assessed and were found to exhibit similar patterns of cell size and PDL (population doubling level since passage 1) as shown for a representative batch in Table 1. Cells also significantly enhanced hematopoiesis in a bone marrow migration (BMM) assay.

TABLE 1
Characteristics of placental cells expanded in SF medium.

| | | | Total | cell | |
|---|---|---|---|---|---|
| | | | growth | size | |
| BATCH | GROUP | Passage | (days) | (μm) | PDL |
| PD200114SFM | A | 1 | 8 | 20.3 | NA |
| | | 2 | 14 | 20.9 | 3.4 |
| | | 3 | 20 | 19.7 | 7 |
| | B | 1 | 8 | 19.5 | NA |
| | | 2 | 15 | 21.5 | 3.4 |
| | | 3 | 21 | 17 | 5.1 |

| | | | |
|---|---|---|---|
| Average P 3 | 19.1 | 17.55 | 6.12 |
| % CV P 3 | 8 | 9 | 11 |

### Example 3: Osteocyte and Adipocyte Differentiation Assays

[0173] ASC were prepared as described in Example 1. BM adherent cells were obtained as described in WO 2016/098061 to Esther Lukasiewicz Hagai and Rachel Ofir, which is incorporated herein by reference in its entirety. Osteogenesis and adipogenesis assays were performed as described in Example 2 of WO 2016/098061. Incubation of BM-derived adherent cells in osteogenic induction medium resulted in differentiation of over 50% of the BM cells, as demonstrated by positive alizarin red staining. On the contrary, none of the placental-derived cells exhibited signs of osteogenic differentiation. Next, a modified osteogenic medium comprising Vitamin D and higher concentrations of dexamethasone was used. Over 50% of the BM cells underwent differentiation into osteocytes, while none of the placental-derived cells exhibited signs of osteogenic differentiation.

[0174] Adipocyte induction. Adipocyte differentiation of placenta- or BM-derived adherent cells in adipocyte induction medium resulted in differentiation of over 50% of the BM-derived cells, as demonstrated by positive oil red staining and by typical morphological changes (e.g., accumulation of oil droplets in the cytoplasm). In contrast, none of the placental-derived cells differentiated into adipocytes. Next, a modified medium containing a higher indomethacin concentration was used. Over 50% of the BM-derived cells underwent differentiation into adipocytes. In contrast, none of the placental-derived cells exhibited morphological changes typical of adipocytes.

### Example 4: Further Osteocyte and Adipocyte Differentiation Assays

[0175] ASC were prepared as described in Example 2. Adipogenesis and Osteogenesis were assessed using the STEMPRO® Adipogenesis Differentiation Kit (GIBCO, Cat #A1007001) and the STEMPRO® Osteogenesis Differentiation Kit (GIBCO, Cat #A1007201), respectively.

[0176] Results

[0177] Adipogenesis and Osteogenesis of placental cells grown in SRM (3 different batches) or in full DMEM were tested. In adipogenesis assays, BM-MSCs treated with differentiation medium stained positively with Oil Red O. By contrast, 2/3 of the SRM batches exhibited negligible staining, and the other SRM batch, as well as the full DMEM-grown cells, did not exhibit any staining at all, showing that they lacked significant adipogenic potential. In osteogenesis assays, BM-MSCs treated with differentiation medium stained positively with Alizarin Red S. By contrast, none of the placental cell batches grown in SRM or full DMEM exhibited staining, showing that they lacked significant osteogenic potential.

### Example 5: Studies of Factors Secreted by Placental ASC

[0178] CM was prepared from two batches each of maternal ASC, fetal ASC expanded in serum-containing medium, and fetal ASC expanded in SFM, after a 6-day bioreactor incubation; or a 2-day incubation in plates, changing the medium once per day.

[0179] Secreted protein expression was measured by Luminex®. (D. Collagen 1-alpha were highly expressed in all samples. IL-1-ra, Collagen IV-la, Fibronectin, IL-13, HGF, VEGF-A, IL-4, PDGF-AA, TIMP-1, TGFb2, TGFb1 were all significantly expressed in at least some samples, while IL-16 was expressed at negligible or no level (FIGS. 2A-J and Tables 2-3).

TABLE 2
summarizes protein expression of the indicated
proteins in bioreactor media.

| Protein | Maternal | Fetal/serum | Fetal/SF |
|---|---|---|---|
| Collagen 1a | +++ | +++ | +++ |
| IL-10 | − | − | − |
| EGF | − | − | − |
| IL-1RA | − | ++ | ++ |
| bFGF | − | − | ++ |
| Collagen IVa1 | ++ | ++ | +++ |
| Fibronectin | +++ | +++ | +++ |
| IL-13 | + | ++ | + |
| HGF | − | +++ | +++ |
| MMP-1 | +++ | +++ | +++ |
| MMP-2 | +++ | +++ | +++ |
| IL-16 | + | + | + |
| VEGF-A | ++ | + | + |
| IL-4 | | + | + |
| PDGF-AA | + | + | + |
| TIMP1 | +++ | +++ | +++ |
| TGFb3 | − | − | − |
| TGFb2 | + | + | + |
| TGFb1 | +++ | +++ | +++ |

−, +, ++, and +++ indicate <10, 10-100, 100-1000, and >1000 pg/ml, respectively.

[0180] Mass spectrometry was performed on fetal/placental ASC-CM from a bioreactor incubation, and tryptic peptides of human origin were identified by their sequences. The peptides are shown in Table 3.

TABLE 3
Tryptic peptides from placental ASC-CM. “HS” refers to Homo sapiens.

| Protein name | gene name (indicated after “GN”) | Uniprot name (in square brackets) |
|---|---|---|
| Z | Z | Z |

Alpha-2-macroglobulin OS = HS GN = A2M PE = 1 SV = 3 - [A2MG_HUMAN]
Agrin OS = HS GN = AGRN PE = 1 SV = 5 - [AGRIN_HUMAN]
Serum albumin OS = HS GN = ALB PE = 1 SV = 1 - [A0A0C4DGB6_HUMAN]
Annexin A1 OS = HS GN = ANXA1 PE = 1 SV = 2 - [ANXA1_HUMAN]
Annexin (Fragment) OS = HS GN = ANXA2 PE = 1 SV = 1 - [H0YMM1_HUMAN]
APOC2 protein OS = HS GN = APOC2 PE = 1 SV = 1 - [Q6P163_HUMAN]
Actin-related protein 2/3 complex subunit 2 OS = HS GN = ARPC2 PE = 1 SV = 1 - [ARPC2_HUMAN]
Renin receptor (Fragment) OS = HS GN = ATP6AP2 PE = 1 SV = 1 - [A0A1B0GWD6_HUMAN]
Beta-2-microglobulin (Fragment) OS = HS GN = B2M PE = 1 SV = 1 - [H0YLF3_HUMAN]
Beta-1,4-glucuronyltransferase 1 OS = HS GN = B4GAT1 PE = 1 SV = 1 - [B4GA1_HUMAN]
Bone morphogenetic protein 1 OS = HS GN = BMP1 PE = 1 SV = 2 - [BMP1_HUMAN]
Complement C4-A OS = HS GN = C4A PE = 1 SV = 1 - [A0A0G2JPR0_HUMAN]
Calcium-binding protein 39-like OS = HS GN = CAB39L PE = 1 SV = 1 - [B7ZBJ4_HUMAN]
Cell adhesion molecule 1 OS = HS GN = CADM1 PE = 1 SV = 1 - [A0A087X0T8_HUMAN]
Capping protein (Actin filament) muscle Z-line, beta, isoform CRA_a OS = HS GN = CAPZB PE = 1
SV = 1 - [B1AK87_HUMAN]
CD44 antigen OS = HS GN = CD44 PE = 1 SV = 2 - [HOYD13_HUMAN]
Tetraspanin OS = HS GN = CD81 PE = 1 SV = 1 - [E9PJK1_HUMAN]
Cadherin-2 OS = HS GN = CDH2 PE = 1 SV = 4 - [CADH2_HUMAN]
Chymotrypsin-like elastase family member 1 OS = HS GN = CELA1 PE = 1 SV = 2 - [CELA1_HUMAN]
Collagen alpha-1(XI) chain (Fragment) OS = HS GN = COL11A1 PE = 1 SV = 8 - [C9JMN2_HUMAN]
Collagen alpha-1(XII) chain OS = HS GN = COL12A1 PE = 1 SV = 1 - [D6RGG3_HUMAN]
Collagen alpha-1(I) chain OS = HS GN = COL1A1 PE = 1 SV = 5 - [CO1A1_HUMAN]
Collagen alpha-1(III) chain OS = HS GN = COL3A1 PE = 1 SV = 4 - [CO3A1_HUMAN]
Collagen alpha-1(IV) chain OS = HS GN = COL4A1 PE = 1 SV = 3 - [CO4A1_HUMAN]
Collagen alpha-2(IV) chain OS = HS GN = COL4A2 PE = 1 SV = 4 - [CO4A2_HUMAN]
Collagen alpha-1(VI) chain OS = HS GN = COL6A1 PE = 1 SV = 1 - [A0A087X0S5_HUMAN]
Collagen alpha-3(VI) chain OS = HS GN = COL6A3 PE = 1 SV = 5 - [CO6A3_HUMAN]
Ceruloplasmin OS = HS GN = CP PE = 1 SV = 1 - [CERU_HUMAN]
Cystatin-C OS = HS GN = CST3 PE = 1 SV = 1 - [CYTC_HUMAN]
Connective tissue growth factor OS = HS GN = CTGF PE = 1 SV = 2 - [CTGF_HUMAN]
Cathepsin Z OS = HS GN = CTSZ PE = 1 SV = 1 - [CATZ_HUMAN]
Protein CutA OS = HS GN = CUTA PE = 1 SV = 1 - [C9IZG4_HUMAN]
Stromal cell-derived factor 1 OS = HS GN = CXCL12 PE = 1 SV = 1 - [SDF1_HUMAN]
Cytoplasmic FMR1-interacting protein 1 OS = HS GN = CYFIP1 PE = 1 SV = 1 - [CYFP1_HUMAN]
Protein CYR61 OS = HS GN = CYR61 PE = 1 SV = 1 - [CYR61_HUMAN]
Dermcidin OS = HS GN = DCD PE = 1 SV = 2 - [DCD_HUMAN]
Dickkopf-related protein 1 OS = HS GN = DKK1 PE = 1 SV = 1 - [DKK1_HUMAN]
Desmoglein-1 OS = HS GN = DSG1 PE = 1 SV = 2 - [DSG1_HUMAN]
Desmoplakin OS = HS GN = DSP PE = 1 SV = 3 - [DESP_HUMAN]
EF-hand domain-containing protein D2 OS = HS GN = EFHD2 PE = 1 SV = 1 - [EFHD2_HUMAN]
Eukaryotic translation initiation factor 4 gamma 1 (Fragment) OS = HS GN = EIF4G1 PE = 1 SV = 1 -
[C9J6B6_HUMAN]
Eukaryotic translation initiation factor 5A OS = HS GN = EIF5A2 PE = 1 SV = 1 - [F8WCJ1_HUMAN]
Fatty acid-binding protein, heart OS = HS GN = FABP3 PE = 1 SV = 1 - [S4R3A2_HUMAN]
Fibulin-1 OS = HS GN = FBLN1 PE = 1 SV = 1 - [B1AHL2_HUMAN]
Fibrillin-1 OS = HS GN = FBN1 PE = 1 SV = 3 - [FBN1_HUMAN]
Filamin-A OS = HS GN = FLNA PE = 1 SV = 1 - [Q5HY54_HUMAN]
Fibronectin OS = HS GN = FN1 PE = 1 SV = 4 - [FINC_HUMAN]
Follistatin-related protein 1 OS = HS GN = FSTL1 PE = 1 SV = 1 - [FSTL1_HUMAN]
Rab GDP dissociation inhibitor beta OS = HS GN = GDI2 PE = 1 SV = 2 - [GDIB_HUMAN]
Glypican-1 OS = HS GN = GPC1 PE = 1 SV = 2 - [H7C410_HUMAN]
Histone H3 OS = HS GN = H3F3B PE = 1 SV = 1 - [K7EMV3_HUMAN]
HCG1745306, isoform CRA_a OS = HS GN = HBA2 PE = 1 SV = 1 - [G3VIN2_HUMAN]
Hemoglobin subunit delta OS = HS GN = HBD PE = 1 SV = 2 - [HBD_HUMAN]
Hepatocyte growth factor activator OS = HS GN = HGFAC PE = 1 SV = 1 - [HGFA_HUMAN]
Histone H2A type 1-H OS = HS GN = HIST1H2AH PE = 1 SV = 3 - [H2A1H_HUMAN]
HLA class I histocompatibility antigen, Cw-6 alpha chain OS = HS GN = HLA-C PE = 1 SV = 1 -
[A0A140T9Z4_HUMAN]
Heterogeneous nuclear ribonucleoproteins A2/B1 OS = HS GN = HNRNPA2B1 PE = 1 SV = 1 -
[A0A087WUI2_HUMAN]
Hornerin OS = HS GN = HRNR PE = 1 SV = 2 - [HORN_HUMAN]
Heat shock protein HSP 90-alpha OS = HS GN = HSP90AA1 PE = 1 SV = 5 - [HS90A_HUMAN]
Endoplasmin OS = HS GN = HSP90B1 PE = 1 SV = 1 - [Q96GW1_HUMAN]
Heat shock 70 kDa protein 1B OS = HS GN = HSPA1B PE = 1 SV = 1 - [HS71B_HUMAN]
Heat shock cognate 71 kDa protein OS = HS GN = HSPA8 PE = 1 SV = 1 - [E9PKE3_HUMAN]
Basement membrane-specific heparan sulfate proteoglycan core protein OS = HS GN = HSPG2
PE = 1 SV = 4 - [PGBM_HUMAN]
Serine protease HTRA1 OS = HS GN = HTRA1 PE = 1 SV = 1 - [HTRA1_HUMAN]
E3 ubiquitin-protein ligase HUWE1 OS = HS GN = HUWE1 PE = 1 SV = 3 - [HUWE1_HUMAN]
Insulin-like growth factor-binding protein 5 OS = HS GN = IGFBP5 PE = 1 SV = 1 - [IBP5_HUMAN]
Insulin-like growth factor-binding protein 6 OS = HS GN = IGFBP6 PE = 1 SV = 1 - [IBP6_HUMAN]
Insulin-like growth factor-binding protein 7 OS = HS GN = IGFBP7 PE = 1 SV = 1 - [IBP7_HUMAN]
Insulin-like growth factor I (Fragment) OS = HS GN = IGF-I PE = 1 SV = 1 - [Q13429_HUMAN]
Junction plakoglobin OS = HS GN = JUP PE = 1 SV = 3 - [PLAK_HUMAN]
Keratinocyte proline-rich protein OS = HS GN = KPRP PE = 1 SV = 1 - [KPRP_HUMAN]
Laminin subunit alpha-1 OS = HS GN = LAMA1 PE = 1 SV = 2 - [LAMA1_HUMAN]
Laminin subunit alpha-4 OS = HS GN = LAMA4 PE = 1 SV = 1 - [A0A0A0MTC7_HUMAN]
Laminin subunit beta-1 OS = HS GN = LAMB1 PE = 1 SV = 2 - [LAMB1_HUMAN]
Laminin subunit gamma-1 OS = HS GN = LAMC1 PE = 1 SV = 3 - [LAMC1_HUMAN]
Galectin-1 OS = HS GN = LGALS1 PE = 1 SV = 2 - [LEG1_HUMAN]
Galectin-3 OS = HS GN = LGALS3 PE = 1 SV = 5 - [LEG3_HUMAN]
Galectin-3-binding protein OS = HS GN = LGALS3BP PE = 1 SV = 1 - [LG3BP_HUMAN]
LIM and senescent cell antigen-like-containing domain protein 1 OS = HS GN = LIMS1 PE = 1 SV = 4 -
[LIMS1_HUMAN]
Vesicular integral-membrane protein VIP36 OS = HS GN = LMAN2 PE = 1 SV = 1 - [LMAN2_HUMAN]
Protein-lysine 6-oxidase OS = HS GN = LOX PE = 1 SV = 2 - [LYOX_HUMAN]
Lysyl oxidase homolog 2 (Fragment) OS = HS GN = LOXL2 PE = 1 SV = 1 - [H0YAR1_HUMAN]
Latent-transforming growth factor beta-binding protein 2 OS = HS GN = LTBP2 PE = 1 SV = 1 -
[G3V3X5_HUMAN]
Lysozyme C OS = HS GN = LYZ PE = 1 SV = 1 - [LYSC_HUMAN]
72 kDa type IV collagenase OS = HS GN = MMP2 PE = 1 SV = 2 - [MMP2_HUMAN]
Moesin OS = HS GN = MSN PE = 1 SV = 3 - [MOES_HUMAN]
Metallothionein-1E OS = HS GN = MT1E PE = 1 SV = 1 - [MT1E_HUMAN]
Matrix-remodeling-associated protein 5 OS = HS GN = MXRA5 PE = 2 SV = 3 - [MXRA5_HUMAN]
Myosin-9 OS = HS GN = MYH9 PE = 1 SV = 4 - [MYH9_HUMAN]
Myosin light polypeptide 6 (Fragment) OS = HS GN = MYL6 PE = 1 SV = 1 - [F8VPF3_HUMAN]
Neurobeachin-like protein 2 OS = HS GN = NBEAL2 PE = 1 SV = 2 - [NBEL2_HUMAN]
Nidogen-1 OS = HS GN = NID1 PE = 1 SV = 3 - [NID1_HUMAN]
Epididymal secretory protein E1 (Fragment) OS = HS GN = NPC2 PE = 1 SV = 1 -
[G3V2V8_HUMAN]
Puromycin-sensitive aminopeptidase OS = HS GN = NPEPPS PE = 1 SV = 1 - [E9PLK3_HUMAN]
Nuclear transport factor 2 (Fragment) OS = HS GN = NUTF2 PE = 1 SV = 1 - [H3BRV9_HUMAN]
Ubiquitin thioesterase OTUB1 OS = HS GN = OTUB1 PE = 1 SV = 1 - [F5GYN4_HUMAN]
Beta-parvin OS = HS GN = PARVB PE = 1 SV = 1 - [A0A087WZB5_HUMAN]
Pterin-4-alpha-carbinolamine dehydratase OS = HS GN = PCBD1 PE = 1 SV = 2 - [PHS_HUMAN]
Profilin-1 OS = HS GN = PFN1 PE = 1 SV = 2 - [PROF1_HUMAN]
Profilin OS = HS GN = PFN2 PE = 1 SV = 1 - [C9J712_HUMAN]
Glycerol-3-phosphate phosphatase OS = HS GN = PGP PE = 1 SV = 1 - [PGP_HUMAN]
Fibrocystin-L OS = HS GN = PKHD1LI PE = 2 SV = 2 - [PKHL1_HUMAN]
Periostin OS = HS GN = POSTN PE = 1 SV = 1 - [B1ALD9_HUMAN]
Ribose-phosphate pyrophosphokinase 3 OS = HS GN = PRPS1L1 PE = 1 SV = 1 -
[A0A0B4J207_HUMAN]
Serine protease 23 (Fragment) OS = HS GN = PRSS23 PE = 1 SV = 1 - [E9PRR2_HUMAN]
Proteasome subunit alpha type-3 OS = HS GN = PSMA3 PE = 1 SV = 2 - [PSA3_HUMAN]
Proteasome subunit alpha type OS = HS GN = PSMA6 PE = 1 SV = 1 - [G3V295_HUMAN]
Proteasome subunit beta type-2 OS = HS GN = PSMB2 PE = 1 SV = 1 - [PSB2_HUMAN]
26S proteasome non-ATPase regulatory subunit 3 OS = HS GN = PSMD3 PE = 1 SV = 2 -
[PSMD3_HUMAN]
26S proteasome non-ATPase regulatory subunit 8 (Fragment) OS = HS GN = PSMD8 PE = 1 SV = 8 -
[K7EJR3_HUMAN]
Prostaglandin-H2 D-isomerase OS = HS GN = PTGDS PE = 1 SV = 1 - [PTGDS_HUMAN]
Peroxidasin homolog OS = HS GN = PXDN PE = 1 SV = 2 - [PXDN_HUMAN]
Sulfhydryl oxidase 1 OS = HS GN = QSOX1 PE = 1 SV = 3 - [QSOX1_HUMAN]
Ras-related protein Rab-11A (Fragment) OS = HS GN = RAB11A PE = 4 SV = 1 -
[H3BMH2_HUMAN]
Ras-related protein Rab-2B OS = HS GN = RAB2B PE = 1 SV = 1 - [E9PE37_HUMAN]
Ras-related protein Rab-5C (Fragment) OS = HS GN = RAB5C PE = 1 SV = 1 - [F8VVK3_HUMAN]
GTP-binding nuclear protein Ran (Fragment) OS = HS GN = RAN PE = 1 SV = 8 - [F5H018_HUMAN]
Retinoic acid receptor responder protein 2 OS = HS GN = RARRES2 PE = 1 SV = 1 - [RARR2_HUMAN]
60S acidic ribosomal protein P0 (Fragment) OS = HS GN = RPLPO PE = 1 SV = 1 - [F8VPE8_HUMAN]
40S ribosomal protein S2 (Fragment) OS = HS GN = RPS2 PE = 1 SV = 1 - [H0YEN5_HUMAN]
Ras suppressor protein 1 OS = HS GN = RSU1 PE = 1 SV = 3 - [RSU1_HUMAN]
Syndecan-4 OS = HS GN = SDC4 PE = 1 SV = 2 - [SDC4_HUMAN]
Alpha-1-antichymotrypsin OS = HS GN = SERPINA3 PE = 1 SV = 1 - [G3V3A0_HUMAN]
Plasminogen activator inhibitor 1 OS = HS GN = SERPINE1 PE = 1 SV = 1 - [PAI1_HUMAN]
Glia-derived nexin OS = HS GN = SERPINE2 PE = 1 SV = 1 - [GDN_HUMAN]
SH3 domain-binding glutamic acid-rich-like protein 3 OS = HS GN = SH3BGRL3 PE = 1 SV = 1 -
[Q5T123_HUMAN]
Sorbitol dehydrogenase OS = HS GN = SORD PE = 1 SV = 1 - [H0YLA4_HUMAN]
SPARC OS = HS GN = SPARC PE = 1 SV = 1 - [SPRC_HUMAN]
Testican-1 OS = HS GN = SPOCK1 PE = 1 SV = 1 - [TICN1_HUMAN]
Soluble scavenger receptor cysteine-rich domain-containing protein SSC5D OS = HS GN = SSC5D
PE = 1 SV = 3 - [SRCRL_HUMAN]
Stanniocalcin-2 (Fragment) OS = HS GN = STC2 PE = 1 SV = 1 - [HOYB13_HUMAN]
Tissue factor pathway inhibitor 2 OS = HS GN = TFPI2 PE = 1 SV = 1 - [TFPI2_HUMAN]
Thrombospondin-1 OS = HS GN = THBS1 PE = 1 SV = 2 - [TSP1_HUMAN]
Metalloproteinase inhibitor 1 OS = HS GN = TIMP1 PE = 1 SV = 1 - [TIMP1_HUMAN]
Metalloproteinase inhibitor 2 OS = HS GN = TIMP2 PE = 1 SV = 2 - [TIMP2_HUMAN]
Tenascin OS = HS GN = TNC PE = 1 SV = 3 - [TENA_HUMAN]
Tropomyosin alpha-3 chain OS = HS GN = TPM3 PE = 1 SV = 1 - [A0A087WWU8_HUMAN]
Tropomyosin alpha-4 chain OS = HS GN = TPM4 PE = 1 SV = 3 - [TPM4_HUMAN]
Translationally-controlled tumor protein OS = HS GN = TPT1 PE = 1 SV = 1 - [TCTP_HUMAN]
Translin (Fragment) OS = HS GN = TSN PE = 1 SV = 1 - [H7C1D4_HUMAN]
Tubulin beta chain OS = HS GN = TUBB PE = 1 SV = 1 - [Q5JP53_HUMAN]
Polyubiquitin-C (Fragment) OS = HS GN = UBC PE = 1 SV = 1 - [F5GYU3_HUMAN]
Ubiquitin-conjugating enzyme E2 N OS = HS GN = UBE2N PE = 1 SV = 1 - [F8VQQ8_HUMAN]
Versican core protein OS = HS GN = VCAN PE = 1 SV = 3 - [CSPG2_HUMAN]
Vimentin OS = HS GN = VIM PE = 1 SV = 1 - [B0YJC4_HUMAN]
Vacuolar protein sorting-associated protein 29 OS = HS GN = VPS29 PE = 1 SV = 1 -
[VPS29_HUMAN]

### Example 6: Immunogenicity & Immunomodulatory Properties of ASC

[0181] The expression of co-stimulatory molecules on ASC was measured. FACS analysis demonstrated the absence of CD80, CD86 and CD40 on the cell membranes. Moreover, the cells expressed low levels HLA class I molecules, as detected by staining for HLA A/B/C.

[0182] To further investigate the immunogenicity and the immunomodulatory properties of the cells, human/rat Mixed Lymphocyte Reaction (MLR) tests were performed. Rat PBMC were stimulated with LPS (lipopolysaccharide) in the absence or presence of (human) ASC, and secretion of IL-10 by the PBMC was measured. ASC increased the IL-10 secretion (FIG. 3).

[0183] MLR performed with 2 different donors also showed that the ASC both escaped allorecognition (FIG. 4A) and reduced lymphocyte proliferation, as measured by thymidine incorporation, following mitogenic stimuli, such as Concanavalin A (Con A) (FIG. 4B) and Phytohemagglutinin (PHA; typically at least 25% inhibition relative to PHA alone), and non-specific stimulation by anti-CD3 and anti-CD28. The reduction in lymphocyte proliferation was dose dependent with the number of ASC.

[0184] Next, PBMC were stimulated by PHA using the Transwell® method (which prevents cell-to-cell contact but enables the diffusion of cytokines between the two compartments). The inhibition of proliferation was maintained even in this assay, showing that cell-to-cell contact was not necessary for the inhibition.

### Example 7: Adherent Stromal Cells Alter Cytokine Secretion by PBMC and Stimulate Endothelial Cell Proliferation

[0185] Additional co-culture studies were performed to test the effect of ASC on secretion of cytokines by lymphocytes. Culturing of PB-derived mononuclear cells (PBMC) with ASC slightly reduced IFN-gamma secretion and dramatically reduced TNF-alpha secretion by the PBMC, even when only low amounts of ASC were present (FIGS. 5A-B). Under conditions of LPS stimulation, the ASC increased secretion of IL-10 by PBMC, while decreasing their secretion of TNF-alpha, in a dose-dependent manner (FIG. 5C).

### Protocol—Endothelial Cell Proliferation (ECP) Assay:

[0186] ASC were prepared as described in Example 1, harvested by vibration, as described in PCT International Application Publ. No. WO 2012/140519, and were cryopreserved. 1×10⁶ thawed ASC were seeded in 2 ml DMEM medium. After 24 hours (hr), the medium was replaced with EBM-2 medium (Lonza Group Ltd, Basel, Switzerland), and cells were incubated under hypoxic conditions (1% O₂) for an additional 24 hr, after which the conditioned media was collected. In parallel, 750 human umbilical cord endothelial cells (HUVEC) were seeded, incubated for 24 hr, and then incubated with the conditioned media, for 4 days under normoxic conditions at 37° C. After removal of the conditioned medium, the proliferation of the HUVEC cells was assayed using the AlamarBlue® fluorescent assay. Results are presented as the percent ECP (%ECP) observed after PHA stimulation in the absence of ASC (arbitrarily set at 100%).

### Results

[0187] ASC cultured under normoxic or hypoxic conditions were tested for protein secretion, using Cytokine (Human) Antibody Array C Series 4000 (RayBio). Secretion of several pro-angiogenic factors was up-regulated under hypoxic conditions, as shown in FIG. 6. In additional experiments, various batches of ASC were co-incubated with HUVEC cells to test their effect on ECP. Stimulation of ECP was observed, typically at least 135% of ECP in the absence of ASC.

### Example 8: Cytokine Secretion by ASC Upon Exposure to Pro-Inflammatory Cytokines

[0188] Methods

[0189] General experimental protocol. ASC were obtained from the placenta and cultured under 2D conditions, then under 3D conditions, and were then harvested, all as described in Example 1, with the following deviation: One day before the end of the 3D culture (typically on day 5 or 6), the medium was replaced with DMEM, with or without the addition of 10 nanograms/milliliter (ng/ml) Tumor Necrosis Factor alpha (TNF-alpha), 10 ng/ml Interferon-Gamma (IFN-g), and/or 10% FBS (Table 4), and the bioreactor was incubated in batch mode (or, in selected experiments, in perfusion mode) for an additional day. Levels of secreted cytokines were measured in the bioreactor medium, using the RayBio® Human Cytokine Array kit.

[0190] Hypoxic incubation. 1×10⁶ thawed ASC were seeded in 2m1 DMEM medium. After 24 hours (hr), the medium was replaced with EBM-2 medium (Lonza Group Ltd, Basel, Switzerland), and cells were incubated under hypoxic conditions (1% O₂) for an additional 24 hr, after which the conditioned media was collected.

TABLE 4
Incubation conditions that were tested.

| Designation | Cytokines | FBS |
|---|---|---|
| 1 | None | NO |
| 2 | None | YES |
| 3 | TNF | NO |
| 4 | TNF | YES |
| 5 | TNF + IFN | NO |
| 6 | TNF + IFN | YES |

[0191] In other experiments, levels of secreted cytokines were measured in the conditioned medium (CM) from a hypoxic incubation, as described above.

[0192] Quantitative detection of secreted proteins: IL-6 was quantitatively measured using the human IL-6 immunoassay Quantikine® ELISA kit (R&D Systems). VEGF was quantitatively measured using the Human VEGF immunoassay Quantikine® kit (R&D Systems).

[0193] Results

[0194] In a series of experiments testing various conditions side-by-side, adherent stromal cells (ASC) were incubated in a bioreactor as described in the previous Examples. On the last day of the bioreactor incubation, the medium was replaced by medium containing or lacking added TNF-alpha and/or IFN-gamma, in the presence or absence of FBS. VEGF and IL-6 secretion were measured by ELISA. Inclusion of TNF-alpha significantly increased secretion of VEGF, whether or not IFN-gamma was present. In the same experiment, inclusion of TNF-alpha significantly increased IL-6 secretion, which was further increased by IFN-gamma

[0195] Expression of a panel of factors in the bioreactor media, all performed in the absence of serum, was measured by a fluorescence-based cytokine array assay, revealing the increased expression of several factors, including GRO, IL-6, IL-8, MCP-1, MCP-2, MCP-3, RANTES, and IP-10 (2 experiments are shown in FIGS. 7A-B). TNF-alpha stimulation was also compared to medium without cytokines, also in the absence of serum, showing increased expression of GRO, IL-8, MCP-1, RANTES, and, to a lesser extent, IL-6, MCP-3, Angiogenin, Insulin-like Growth Factor Binding Protein-2 (IGFBP-2), Osteopontin, and Osteoprotegerin (FIGS. 7C-D).

[0196] Increased expression of MCP-1 and GM-CSF in the bioreactor media was verified by quantitative ELISA in several experiments, all performed in the absence of serum. The results showed that TNF-alpha+IFN-gamma was superior to TNF-alpha alone for MCP-1 induction (FIG. 8A), while TNF-alpha alone appeared to be slightly superior for GM-CSF induction (FIG. 8B).

[0197] The next experiment examined the effect of FBS on induction of the aforementioned panel of factors by TNF-alpha+IFN-gamma or TNF-alpha alone. A similar set of major proteins, including RANTES, was induced in the presence or absence of FBS.

### Example 9: Quantitative Rantes ELISA on ASC

[0198] ASC were incubated with 10 ng/ml TNF-alpha, alone or in combination with 10 ng/ml IFN-gamma. The cells were cryopreserved, then thawed, and then 5×10⁵ cells were seeded in DMEM supplemented with 10% FBS and incubated under standard conditions. After 24 hours, the medium was replaced with 1-ml serum-free medium, and the cells were incubated another 24 hours under normoxic conditions. The medium was removed and assayed for RANTES secretion by ELISA, using the Quantikine® ELISA Human CCL5/RANTES kit (R&D Systems). The TNF-alpha+IFN-gamma-treated cells had sharply upregulated RANTES secretion compared to the other groups (Table 5).

TABLE 5
RANTES concentrations in culture medium.

| | | RANTES | Standard |
|---|---|---|---|
| Expt. No. | Conditions | conc. | dev. |
| 5 | No cytokines, no serum | 0 | 0 |
| 7 | No cytokines, serum. | 2 | 1 |
| 8 | No cytokines, serum | 0 | 0 |
| 5 | TNF-alpha, no serum | 76 | 2 |
| 7 | TNF-alpha, serum. | 591 | 20 |
| 8 | IFN-gamma + | 3232* | 83 |
| | TNF-alpha + serum. | | |

*Out of calibration curve.

### Example 10 Treatment of Pulmonary Arterial Hypertension With Placental ASC

[0199] Nude rats were administered mock-treated or given monocrotaline (MCT) at 70 mg/kg intraperitoneally, and were administered intramuscularly 15, 25, or 35×10⁶/kg. placental/maternal ASC or vehicle on days 7 and 14. Right ventricular systolic pressure (RVSP) was assessed on day 24, and was found to be improved in the treated groups' lungs (FIG. 9). In another experiment, Sprague Dawley rats were mock-treated or given MCT, and were administered intravenously (slow bolus via tail vein) (1.33 or 6.67×10⁶/kg) either of 2 different batches of placental/maternal ASC or vehicle on days 7 or 14. RVSP on day 31 showed improvement in nearly all groups.

### Example 11: Treatment of Lung Fibrosis With Placental ASC

[0200] Adult male C57BL/6 mice (n=10/ group) were administered bleomycin intratracheally, followed by administration of 1 of 2 different batches of 0.5 million placental ASC, intratracheally. ASC treatment reduced weight loss, protected mice from loss in exercise capacity, prevented loss in O₂ saturation, drastically improved lung histology, and reduced collagen deposition in the lungs (FIGS. 10A-F).

### Example 12: Treatment of Acute Kidney Injury With Placental ASC

[0201] Male C57BL/6J mice aged 8-10 weeks were subjected to warm ischemia/reperfusion injury (IRI) by unilateral/right nephrectomy, followed by clamping the left renal artery and vein for one hour, then unclamping and reperfusion. 2.5 (low-dose) or 25 (high-dose) million/kg. placental ASC were administered IV or IM, 1 (=day 0), 24, or 72 hours after unclamping. There was a large decrease in percentage of necrotic tissue in the kidneys, as evidenced by histology (FIG. 11A). Images of representative day 21 Periodic Acid Schiff (PAS) tissue staining are shown for an untreated IRI mouse (B; 25.3% necrosis); low-dose IM ASC given on day 0 (C; 25.4% necrosis), 1 (D; 0.4% necrosis), or 3 (E; 2.3% necrosis); high-dose IM ASC given on day 1 (F; 0% necrosis) or 3 (G; 0% necrosis); and high-dose IV ASC given on day 0 (H; 4.5% necrosis), 1 (I; 4.5% necrosis), or 3 (J; 5.9% necrosis).

### Example 13: Treating Gastrointestinal Injury With Placental ASC

[0202] Male and female C57BL/6J mice were untreated (Group 1) or subjected to LD50/30 (1250 cGy) partial body irradiation (PBI) dose using 2.5% bone marrow sparing (Groups 2-4; n=30) as a model of gastrointestinal complications of viral pneumonia. 24 hours later, mice were administered vehicle (IM) (Group 2) or 2 doses of intramuscular (IM) placental/fetal ASC at a dose of 80 million cells/kg (or 80×10⁶ cells/kg) on days 1 and 3 (Group 3), or days 1 and 5 (Group 4). Statistically significant improvement for Day 30 survival was seen for combined sexes of Group 3 mice treated with ASC on Days 1 and 3 compared with control Group 2 mice treated with vehicle on Days 1 and 5 (Table 6).

TABLE 6
Survival of treated vs. untreated mice following GI injury.

| | | Treatment | | | Percent Survival | | | Total |
|---|---|---|---|---|---|---|---|---|
| | | Regimen | No. Survived to Day 30 | | Male | Female | Both | Percent |
| Group | Treatment | (Days) | Males | Females | alone | alone | sexes | Lethality |
| 2 | Vehicle Control | 1 and 5 | 5 | 2 | 21% | 8% | 15% | 85% |
| | Plasma-Lyte 148 | | | | | | | |
| 3 | ASC | 1 and 3 | 10 | 4 | 42% | 17% | 29% | 71% |

### Example 14: Treatment of Viral-Induced Pneumonia and Complications With Placental ASC

[0203] Methods

[0204] Data Analysis

[0205] All data analyses were conducted in version 3.6.1 of R (R Core Team, 2019). Using the lmerTest package, baseline adjusted repeated measures linear models were fit with restricted maximum likelihood (REML), and t-tests were computed using Satterthwaite's method. Time points in which only a single subject contributed data were omitted before running the repeated measures models.

[0206] Patient Characteristics

[0207] The general characterization of the patients is described in Table 7. Eight patients (7 males and 1 female) were treated. All patients were confirmed for SARS-CoV-2 infection by real-time reverse transcriptase polymerase chain reaction (RT-PCR). The median age of the patients was 55 years (range 22-79 years). 5/8 patients were at higher risk for severe illness from COVID-19 due to underlying medical conditions. The most common comorbidities were hypertension (4 patients) and diabetes (4 patients), with 3 patients suffering from both. 7 patients had BMI above 25. None of the patients were active smokers. Prior to ASC treatment, all patients had received hydroxychloroquine, 3 patients received lopinavir/ritonavir, and 2 patients received remdesivir. In addition, 3 patients had received IL-6 inhibitors, and 4 patients had received steroids. Two patients needed Extracorporeal Membrane Oxygenation (ECMO). The first, patient #6, needed resuscitation due to a massive pulmonary embolism, occurring 4 days after ASC treatment, and was placed on ECMO until full recovery. The second, #4, was electively placed on ECMO due to severe non-resolving ARDS and hypoxia. The average length of hospital stay was 41 days for the six patients being discharged by follow-up end. 5/8 patients were intubated for at least 5 days before ASC treatment, with 1 patient (#8) being intubated for 22 days prior to ASC treatment.

TABLE 7
General characteristics of patient population.

| Subject # | 1 | 2 | 3 | 4 | 5 | 6 | 7 | 8 |
|---|---|---|---|---|---|---|---|---|
| Site | Rambam | Bnai | Rambam | Assuta | Assuta | Assuta | Bnai | Holy |
| | | Zion | | | | | Zion | Cross |
| Age | 71 | 79 | 56 | 54 | 53 | 22 | 65 | 49 |
| Sex | M | M | M | M | M | M | F | M |
| BMI | >30 | >30 | 29.5 | 24.4 | 30 | 30.5 | >30 | 27.8 |
| Active smoker | N | N | N | N | N | N | N | N |
| Diabetes | Y | N | Y | N | Y | N | Y | N |
| Hypertension | Y | Y | Y | N | N | N | Y | N |
| COPD | N | N | N | N | N | N | N | N |
| Ischemic heart | N | N | N | N | N | N | N | N |
| disease | | | | | | | | |
| Number ASC | 2 | 1 | 2 | 1 | 1 | 1 | 2 | 1 |
| treatments | | | | | | | | |
| Other investigat. | H, L | H, R | H, L | H, IL6 | H, IL6 | H | H, L, | H, R |
| drugs * | | | | | | | IL6 | |
| Steroids | Y | Y | N | N | N | Y | N | Y |
| No. hospital days | 26 | 69 | 22 | NA | 27 | 48 | NA | 56 |
| Days intubated | 5 | 14 | 1 | 10 | 10 | 2 | 2 | 22 |
| before treatment | | | | | | | | |
| Days intubated | 20 | 16 | 7 | ongoing | 14 | NA | 35 | 11 |
| after treatment | | | | | | | | |
| Status | Died | Dis'd* | Dis'd | In hosp. | Dis'd | Dis'd | In hosp. | Dis'd |

* H = hydroxychloroquine; L = Lopinavir/ritonavir; R = Resmdesivir; IL6 = anti IL-6;
NA = data not available.
Dis'd = discharged.

[0208] Results

[0209] Eight 2019-nCoV-infected patients, all in Intensive Care Units (ICU) on invasive mechanical ventilation and suffering from Acute Respiratory Distress Syndrome (ARDS), were enrolled in a compassionate use program over a 9-day period. Patients were administered 300 million maternal placental ASC in a mixture containing 10% DMSO, 5% human serum albumin and Plasma-Lyte®, via 15 IM injections (1 mL each). 3/8 received an additional treatment of 300 million cells 8 or 11 days later, according to the physician's discretion.

[0210] COVID-19-infected patients that require invasive mechanical ventilation are considered at high risk for mortality (Bhatraju P K et al.). Despite that, the patients studied exhibited a 100% survival rate at the first assessment, which was at least 1 week after treatment for 6/7 of the patients and 2 days after treatment for the 7^{th}. Furthermore, 4 patients exhibited multi-organ failure prior to treatment; 2/4 (50%) exhibited clinical recovery in addition to the respiratory improvement.

[0211] No adverse events attributed to ASC treatment were reported.

[0212] Improvement in CRP Levels

[0213] By day 3 post injection, mean CRP had fallen 45% (240.3 mg/L to 131.3 mg/L, p=1.9×10⁻³) and by day 5, 77% (to 56.0 mg/L, p=7.7×10⁻⁶) (FIG. 12A). The drop in blood CRP following injection of ASC either on day 0 (data from all subjects is shown) or, if the subject had a second injection, on either day 8 or 11 (day 11 for subject #1 or day 8 for subjects #3 and #7) is shown in FIG. 12B. These data generally show that the higher the level of blood CRP, the more dramatic the reduction following treatment.

[0214] Improvement in Respiratory Parameters

[0215] PaO_{2/}FiO₂ increased in 5/8 patients 24 h post treatment, with a similar effect 48 h post treatment (Table 8). A decrease in PEEP (Positive End Expiratory Pressure) and increase in pH were both statistically significant between days 0-14 (p=3.2×10⁻³ and p=7.2×10⁻⁴, respectively; FIGS. 13A-B).

TABLE 8
P/F ratio of patients before and after treatment.

| Patient | Before | 24 h Post | 48 h Post |
|---|---|---|---|
| No. | Treatment | Treatment | Treatment |
| 1 | 160 | 229 | 170 |
| 2 | 140 | 172.5 | 177.5 |
| 3 | 143 | 151 | 217 |
| 4 | 149 | 107 | NA |
| 5 | 106 | 145 | NA |
| 6 | 173 | 205 | NA |
| 7 | 172 | 93 | 95 |
| 8 | 342.5 | NA | 425 |

NA = data not available

[0216] Most of the patients (6 out of 8) required vasopressor treatments prior to enrollment. In 3 patients, vasopressor doses could be decreased following ASC treatments and/or discontinued as early as 3 days post treatment (patient #3).

[0217] Changes in Chest Radiographs

[0218] Chest radiographs were obtained from 6 patients. In patients #1 and #3, the radiographs demonstrated some resolution and improvement in the interstitial opacities. FIG. 14 provides the image from patient #3. Some improvement was also seen in patients #5, #6, and #8. No improvement was seen in patient #4. (Data prior to ASC treatment was not available for patients #2 and #7).

[0219] Improvement in Kidney Function

[0220] A decrease in creatinine, indicative of acute kidney injury, was statistically significant between days 0-14 (p=3.2×10⁻²; FIG. 15), representing a 53% drop (from 1.875 to 0.883 mg/dL).

[0221] 28-day Follow Up Data

[0222] After a 28-day follow-up period, 7/8 (87.5%) of the subjects were still alive, 6/8 (75%) had been weaned off mechanical ventilation, and 5/8 (62.5%) had been discharged alive from the hospital. By contrast, mortality rates of ARDS COVID-19 patients who require mechanical ventilation are reported to range between 24.5% to 94% in different studies (Richardson S et al. and Gibson P G et al.)

### Example 15: Further Testing of Placental ASC for Treatment of Viral-Induced Pneumonia and Complications Thereof

[0223] High-risk 2019-nCoV-infected patients are administered placebo (Plasma-Lyte®), (negative control); or 300 or 600 million maternal placental ASC, via 15 or 30 IM injections, in a clinical trial. Some groups receive 2 doses of placebo or 300 (or 600) million ASC, spaced one week apart. Amelioration of pneumonia, complications thereof, or other sequelae of viral infection is indicative of therapeutic efficacy.

### Example 16: Use of ASC in Treating Viral-Induced Sequelae

[0224] Recovered 2019-nCoV-infected patients complaining of continuing symptoms (fatigue; anxiety; shortness of breath; sustained cough; or limb pain [e.g., arm and/or leg pain], such as a burning sensation, a tingling, or a feeling of unease) are administered placebo (Plasma-Lyte®), (negative control); or 300 or 600 million maternal placental ASC, via 15 or 30 IM injections, in a clinical trial. Some groups receive 2 doses of placebo or 300 or 600 million ASC, spaced one week apart. Amelioration of continuing symptoms is indicative of therapeutic efficacy.

### Example 17: Use of ASC in Treating an Animal Model of ARDS

[0225] Methods

[0226] Female BALB/c mice were challenged with intratracheal instillation of LPS, followed by intramuscular administration of placental ASC (2 different batches) or placebo group. A naive (unchallenged) group served as an additional control. 72 h after LPS challenge, bronchoalveolar lavage was performed, and mice were sacrificed. Cytokines were measured in lavage fluid (BALF) and serum, and histopathology was performed on the lung specimens. Lung injury score is a composite of scores (0-2 each) for neutrophil infiltration, fibrin deposition, and alveolar thickening. For inter-group comparisons, ANOVA was performed, followed by Tukey's multiple comparisons test.

[0227] Results

[0228] ASC treatment showed a clear trend of reduced levels of several hyperinflammatory markers (Chaudhari S et al.) in both BALF and serum, for example IFN-g (FIGS. 16A-B), interleukin 2 (IL-2) (C-E), TNF-a (F-G), and CXCL-10 ((IP-10; Uniprot Accession No. P02778; accessed on Mar. 10, 2021) (H-J). In E and J, both ASC-treated groups were combined into the single dataset. Furthermore, lung injury score and alveolar thickening (K-L) were both significantly reduced in the treated groups.

[0229] It is appreciated that certain features of the invention, which are, for clarity, described in the context of separate embodiments, may also be provided in combination in a single embodiment. Conversely, various features of the invention, which are, for brevity, described in the context of a single embodiment, may also be provided separately or in any suitable subcombination.

[0230] Although the invention has been described in conjunction with specific embodiments thereof, it is evident that many alternatives, modifications and variations will be apparent to those skilled in the art. Accordingly, it is intended to embrace alternatives, modifications and variations that fall within the spirit and broad scope of the claims and description. All publications, patents and patent applications and GenBank Accession numbers mentioned in this specification are herein incorporated in their entirety by reference into the specification, to the same extent as if each individual publication, patent or patent application or GenBank Accession number was specifically and individually indicated to be incorporated herein by reference. In addition, citation or identification of any reference in this application shall not be construed as an admission that such reference is available as prior art to the invention.

### References (Additional References May Be Cited in Text)

[0231] Bhatraju P K et al., Covid-19 in Critically Ill Patients in the Seattle Region-Case Series. N Engl J Med. 2020 Mar. 30. doi: 10.1056/NEJMoa2004500. [Epub ahead of print]
[0232] Bray M et al., Haematological, biochemical and coagulation changes in mice, guinea-pigs and monkeys infected with a mouse-adapted variant of Ebola Zaire virus. J Comp Pathol. 2001 November;125(4):243-53.
[0233] Chaudhari S et al., Comorbidities and inflammation associated with ovarian cancer and its influence on SARS-CoV-2 infection, J Ovarian Res. 2021 Feb. 25;14(1):39.
[0234] Dominici et al., Minimal criteria for defining multipotent mesenchymal stromal cells. The International Society for Cellular Therapy position statement. Cytotherapy. 2006; 8(4):315-7.
[0235] Geisbert T W et al., Mechanisms underlying coagulation abnormalities in ebola hemorrhagic fever: overexpression of tissue factor in primate monocytes/macrophages is a key event. J Infect Dis. 2003 Dec. 1;188(11):1618-29.
[0236] Gibson P G et al., COVID-19 ARDS: clinical features and differences to “usual” pre-COVID ARDS. The Medical Journal of Australia. 2020. [Preprint, 24 Apr. 2020].
[0237] Kinzebach S and Bieback K. Expansion of Mesenchymal Stem/Stromal cells under xenogenic-free culture conditions. Adv Biochem Eng Biotechnol. 2013;129:33-57.
[0238] Monaca E et al, Assessment of hemostaseologic alterations induced by hyperbaric oxygen therapy using point-of-care analyzers. Undersea Hyperb Med. 2014 January-February;41(1):17-26.
[0239] Richardson S et al., Presenting Characteristics, Comorbidities, and Outcomes Among 5700 Patients Hospitalized With COVID-19 in the New York City Area. JAMA 2020. doi:10.1001/jama.2020.6775
[0240] Yen J Y et al., Therapeutics of Ebola hemorrhagic fever: whole-genome transcriptional analysis of successful disease mitigation. J Infect Dis. 2011 November;204 Suppl 3:S1043-52.

1. A method for treating or ameliorating a coronavirus infection, comprising administering a composition that comprises a cultured placental adherent stromal cell (ASC), thereby treating or ameliorating a coronavirus infection.

2. A method for treating or ameliorating a complication of a coronavirus infection, comprising administering a composition that comprises a cultured placental adherent stromal cell (ASC), thereby treating or ameliorating a complication of a coronavirus infection.

3. A method for treating, preventing, or ameliorating a pneumonia, comprising administering a composition that comprises a cultured placental adherent stromal cell (ASC), wherein said pneumonia is associated with a viral infection, thereby treating, preventing, or ameliorating pneumonia.

4. A method for treating, preventing, or ameliorating a complication of a pneumonia, comprising administering a composition that comprises a cultured placental adherent stromal cell (ASC), wherein said pneumonia is associated with a viral infection, thereby treating, preventing, or ameliorating a complication of pneumonia.

5-8. (canceled)

9. The method of claim 1, where said composition is an injected composition.

10. (canceled)

11. The method of claim 1, wherein said placental ASC have been incubated on a 3D substrate.

12. The method of claim 11, wherein said placental ASC have been incubated on a 2D substrate, prior to incubating on a 3D substrate.

13. The method or composition of claim 11, wherein said 3D culture substrate comprises a synthetic adherent material, wherein said synthetic adherent material is a fibrous matrix.

14. (canceled)

15. The method of claim 13, wherein said synthetic adherent material is selected from the group consisting of a polyester, a polypropylene, a polyalkylene, a polyfluorochloroethylene, a polyvinyl chloride, a polystyrene, and a polysulfone.

16. The method of claim 11, wherein said 3D culture apparatus comprises microcarriers disposed within a bioreactor.

17. The method of claim 1, wherein said placental ASC is allogeneic to said subject.

18. The method of claim 1, wherein the composition is intramuscularly injected.

19. The method of claim 1, comprising 100-600 million of said placental ASC, for an adult subject.

20. The method of claim 1, wherein said composition comprises:
a. a first pharmaceutical composition, comprising allogeneic placental ASC from a first donor; and
b. a second pharmaceutical composition, comprising allogeneic placental ASC from a second donor, wherein said second donor differs from said first donor in at least one allele group of human leukocyte antigen (HLA)-A or human leukocyte antigen (HLA)-B.

21. (canceled)

22. The method of claim 4, wherein said complication is lung fibrosis.

23. The method of claim 2, wherein said complication is systemic inflammatory response syndrome.

24. The method of claim 1, wherein said ASC express a marker selected from the group consisting of CD73, CD90, CD29 and CD105.

25. The method of claim 1, wherein said ASC do not express a marker selected from the group consisting of CD3, CD4, CD11b, CD14, CD19, and CD34.

26. The method of claim 1, wherein said ASC do not express a marker selected from the group consisting of CD3, CD4, CD34, CD39, and CD106.

27. The method of claim 26, wherein less than 50% of said ASC express CD200.

The application's sequence listing, which the Patent Office published only in electronic form, follows.

SEQUENCE LISTING (17 sequences)

SEQ ID NO: 1 - DNA, 29903 bp, SARS-CoV-2
attaaaggtttataccttcccaggtaacaaaccaaccaactttcgatctcttgtagatctgttctctaaacgaactttaaaatctgtgtggctgtcactcggctgcatgcttagtgcactcacgcagtataattaataactaattactgtcgttgacaggacacgagtaactcgtctatcttctgcaggctgcttacggtttcgtccgtgttgcagccgatcatcagcacatctaggtttcgtccgggtgtgaccgaaaggtaagatggagagccttgtccctggtttcaacgagaaaacacacgtccaactcagtttgcctgttttacaggttcgcgacgtgctcgtacgtggctttggagactccgtggaggaggtcttatcagaggcacgtcaacatcttaaagatggcacttgtggcttagtagaagttgaaaaaggcgttttgcctcaacttgaacagccctatgtgttcatcaaacgttcggatgctcgaactgcacctcatggtcatgttatggttgagctggtagcagaactcgaaggcattcagtacggtcgtagtggtgagacacttggtgtccttgtccctcatgtgggcgaaataccagtggcttaccgcaaggttcttcttcgtaagaacggtaataaaggagctggtggccatagttacggcgccgatctaaagtcatttgacttaggcgacgagcttggcactgatccttatgaagattttcaagaaaactggaacactaaacatagcagtggtgttacccgtgaactcatgcgtgagcttaacggaggggcatacactcgctatgtcgataacaacttctgtggccctgatggctaccctcttgagtgcattaaagaccttctagcacgtgctggtaaagcttcatgcactttgtccgaacaactggactttattgacactaagaggggtgtatactgctgccgtgaacatgagcatgaaattgcttggtacacggaacgttctgaaaagagctatgaattgcagacaccttttgaaattaaattggcaaagaaatttgacaccttcaatggggaatgtccaaattttgtatttcccttaaattccataatcaagactattcaaccaagggttgaaaagaaaaagcttgatggctttatgggtagaattcgatctgtctatccagttgcgtcaccaaatgaatgcaaccaaatgtgcctttcaactctcatgaagtgtgatcattgtggtgaaacttcatggcagacgggcgattttgttaaagccacttgcgaattttgtggcactgagaatttgactaaagaaggtgccactacttgtggttacttaccccaaaatgctgttgttaaaatttattgtccagcatgtcacaattcagaagtaggacctgagcatagtcttgccgaataccataatgaatctggcttgaaaaccattcttcgtaagggtggtcgcactattgcctttggaggctgtgtgttctcttatgttggttgccataacaagtgtgcctattgggttccacgtgctagcgctaacataggttgtaaccatacaggtgttgttggagaaggttccgaaggtcttaatgacaaccttcttgaaatactccaaaaagagaaagtcaacatcaatattgttggtgactttaaacttaatgaagagatcgccattattttggcatctttttctgcttccacaagtgcttttgtggaaactgtgaaaggtttggattataaagcattcaaacaaattgttgaatcctgtggtaattttaaagttacaaaaggaaaagctaaaaaaggtgcctggaatattggtgaacagaaatcaatactgagtcctctttatgcatttgcatcagaggctgctcgtgttgtacgatcaattttctcccgcactcttgaaactgctcaaaattctgtgcgtgttttacagaaggccgctataacaatactagatggaatttcacagtattcactgagactcattgatgctatgatgttcacatctgatttggctactaacaatctagttgtaatggcctacattacaggtggtgttgttcagttgacttcgcagtggctaactaacatctttggcactgtttatgaaaaactcaaacccgtccttgattggcttgaagagaagtttaaggaaggtgtagagtttcttagagacggttgggaaattgttaaatttatctcaacctgtgcttgtgaaattgtcggtggacaaattgtcacctgtgcaaaggaaattaaggagagtgttcagacattctttaagcttgtaaataaatttttggctttgtgtgctgactctatcattattggtggagctaaacttaaagccttgaatttaggtgaaacatttgtcacgcactcaaagggattgtacagaaagtgtgttaaatccagagaagaaactggcctactcatgcctctaaaagccccaaaagaaattatcttcttagagggagaaacacttcccacagaagtgttaacagaggaagttgtcttgaaaactggtgatttacaaccattagaacaacctactagtgaagctgttgaagctccattggttggtacaccagtttgtattaacgggcttatgttgctcgaaatcaaagacacagaaaagtactgtgcccttgcacctaatatgatggtaacaaacaataccttcacactcaaaggcggtgcaccaacaaaggttacttttggtgatgacactgtgatagaagtgcaaggttacaagagtgtgaatatcacttttgaacttgatgaaaggattgataaagtacttaatgagaagtgctctgcctatacagttgaactcggtacagaagtaaatgagttcgcctgtgttgtggcagatgctgtcataaaaactttgcaaccagtatctgaattacttacaccactgggcattgatttagatgagtggagtatggctacatactacttatttgatgagtctggtgagtttaaattggcttcacatatgtattgttctttctaccctccagatgaggatgaagaagaaggtgattgtgaagaagaagagtttgagccatcaactcaatatgagtatggtactgaagatgattaccaaggtaaacctttggaatttggtgccacttctgctgctcttcaacctgaagaagagcaagaagaagattggttagatgatgatagtcaacaaactgttggtcaacaagacggcagtgaggacaatcagacaactactattcaaacaattgttgaggttcaacctcaattagagatggaacttacaccagttgttcagactattgaagtgaatagttttagtggttatttaaaacttactgacaatgtatacattaaaaatgcagacattgtggaagaagctaaaaaggtaaaaccaacagtggttgttaatgcagccaatgtttaccttaaacatggaggaggtgttgcaggagccttaaataaggctactaacaatgccatgcaagttgaatctgatgattacatagctactaatggaccacttaaagtgggtggtagttgtgttttaagcggacacaatcttgctaaacactgtcttcatgttgtcggcccaaatgttaacaaaggtgaagacattcaacttcttaagagtgcttatgaaaattttaatcagcacgaagttctacttgcaccattattatcagctggtatttttggtgctgaccctatacattctttaagagtttgtgtagatactgttcgcacaaatgtctacttagctgtctttgataaaaatctctatgacaaacttgtttcaagctttttggaaatgaagagtgaaaagcaagttgaacaaaagatcgctgagattcctaaagaggaagttaagccatttataactgaaagtaaaccttcagttgaacagagaaaacaagatgataagaaaatcaaagcttgtgttgaagaagttacaacaactctggaagaaactaagttcctcacagaaaacttgttactttatattgacattaatggcaatcttcatccagattctgccactcttgttagtgacattgacatcactttcttaaagaaagatgctccatatatagtgggtgatgttgttcaagagggtgttttaactgctgtggttatacctactaaaaaggctggtggcactactgaaatgctagcgaaagctttgagaaaagtgccaacagacaattatataaccacttacccgggtcagggtttaaatggttacactgtagaggaggcaaagacagtgcttaaaaagtgtaaaagtgccttttacattctaccatctattatctctaatgagaagcaagaaattcttggaactgtttcttggaatttgcgagaaatgcttgcacatgcagaagaaacacgcaaattaatgcctgtctgtgtggaaactaaagccatagtttcaactatacagcgtaaatataagggtattaaaatacaagagggtgtggttgattatggtgctagattttacttttacaccagtaaaacaactgtagcgtcacttatcaacacacttaacgatctaaatgaaactcttgttacaatgccacttggctatgtaacacatggcttaaatttggaagaagctgctcggtatatgagatctctcaaagtgccagctacagtttctgtttcttcacctgatgctgttacagcgtataatggttatcttacttcttcttctaaaacacctgaagaacattttattgaaaccatctcacttgctggttcctataaagattggtcctattctggacaatctacacaactaggtatagaatttcttaagagaggtgataaaagtgtatattacactagtaatcctaccacattccacctagatggtgaagttatcacctttgacaatcttaagacacttctttctttgagagaagtgaggactattaaggtgtttacaacagtagacaacattaacctccacacgcaagttgtggacatgtcaatgacatatggacaacagtttggtccaacttatttggatggagctgatgttactaaaataaaacctcataattcacatgaaggtaaaacattttatgttttacctaatgatgacactctacgtgttgaggcttttgagtactaccacacaactgatcctagttttctgggtaggtacatgtcagcattaaatcacactaaaaagtggaaatacccacaagttaatggtttaacttctattaaatgggcagataacaactgttatcttgccactgcattgttaacactccaacaaatagagttgaagtttaatccacctgctctacaagatgcttattacagagcaagggctggtgaagctgctaacttttgtgcacttatcttagcctactgtaataagacagtaggtgagttaggtgatgttagagaaacaatgagttacttgtttcaacatgccaatttagattcttgcaaaagagtcttgaacgtggtgtgtaaaacttgtggacaacagcagacaacccttaagggtgtagaagctgttatgtacatgggcacactttcttatgaacaatttaagaaaggtgttcagataccttgtacgtgtggtaaacaagctacaaaatatctagtacaacaggagtcaccttttgttatgatgtcagcaccacctgctcagtatgaacttaagcatggtacatttacttgtgctagtgagtacactggtaattaccagtgtggtcactataaacatataacttctaaagaaactttgtattgcatagacggtgctttacttacaaagtcctcagaatacaaaggtcctattacggatgttttctacaaagaaaacagttacacaacaaccataaaaccagttacttataaattggatggtgttgtttgtacagaaattgaccctaagttggacaattattataagaaagacaattcttatttcacagagcaaccaattgatcttgtaccaaaccaaccatatccaaacgcaagcttcgataattttaagtttgtatgtgataatatcaaatttgctgatgatttaaaccagttaactggttataagaaacctgcttcaagagagcttaaagttacatttttccctgacttaaatggtgatgtggtggctattgattataaacactacacaccctcttttaagaaaggagctaaattgttacataaacctattgtttggcatgttaacaatgcaactaataaagccacgtataaaccaaatacctggtgtatacgttgtctttggagcacaaaaccagttgaaacatcaaattcgtttgatgtactgaagtcagaggacgcgcagggaatggataatcttgcctgcgaagatctaaaaccagtctctgaagaagtagtggaaaatcctaccatacagaaagacgttcttgagtgtaatgtgaaaactaccgaagttgtaggagacattatacttaaaccagcaaataatagtttaaaaattacagaagaggttggccacacagatctaatggctgcttatgtagacaattctagtcttactattaagaaacctaatgaattatctagagtattaggtttgaaaacccttgctactcatggtttagctgctgttaatagtgtcccttgggatactatagctaattatgctaagccttttcttaacaaagttgttagtacaactactaacatagttacacggtgtttaaaccgtgtttgtactaattatatgccttatttctttactttattgctacaattgtgtacttttactagaagtacaaattctagaattaaagcatctatgccgactactatagcaaagaatactgttaagagtgtcggtaaattttgtctagaggcttcatttaattatttgaagtcacctaatttttctaaactgataaatattataatttggtttttactattaagtgtttgcctaggttctttaatctactcaaccgctgctttaggtgttttaatgtctaatttaggcatgccttcttactgtactggttacagagaaggctatttgaactctactaatgtcactattgcaacctactgtactggttctataccttgtagtgtttgtcttagtggtttagattctttagacacctatccttctttagaaactatacaaattaccatttcatcttttaaatgggatttaactgcttttggcttagttgcagagtggtttttggcatatattcttttcactaggtttttctatgtacttggattggctgcaatcatgcaattgtttttcagctattttgcagtacattttattagtaattcttggcttatgtggttaataattaatcttgtacaaatggccccgatttcagctatggttagaatgtacatcttctttgcatcattttattatgtatggaaaagttatgtgcatgttgtagacggttgtaattcatcaacttgtatgatgtgttacaaacgtaatagagcaacaagagtcgaatgtacaactattgttaatggtgttagaaggtccttttatgtctatgctaatggaggtaaaggcttttgcaaactacacaattggaattgtgttaattgtgatacattctgtgctggtagtacatttattagtgatgaagttgcgagagacttgtcactacagtttaaaagaccaataaatcctactgaccagtcttcttacatcgttgatagtgttacagtgaagaatggttccatccatctttactttgataaagctggtcaaaagacttatgaaagacattctctctctcattttgttaacttagacaacctgagagctaataacactaaaggttcattgcctattaatgttatagtttttgatggtaaatcaaaatgtgaagaatcatctgcaaaatcagcgtctgtttactacagtcagcttatgtgtcaacctatactgttactagatcaggcattagtgtctgatgttggtgatagtgcggaagttgcagttaaaatgtttgatgcttacgttaatacgttttcatcaacttttaacgtaccaatggaaaaactcaaaacactagttgcaactgcagaagctgaacttgcaaagaatgtgtccttagacaatgtcttatctacttttatttcagcagctcggcaagggtttgttgattcagatgtagaaactaaagatgttgttgaatgtcttaaattgtcacatcaatctgacatagaagttactggcgatagttgtaataactatatgctcacctataacaaagttgaaaacatgacaccccgtgaccttggtgcttgtattgactgtagtgcgcgtcatattaatgcgcaggtagcaaaaagtcacaacattgctttgatatggaacgttaaagatttcatgtcattgtctgaacaactacgaaaacaaatacgtagtgctgctaaaaagaataacttaccttttaagttgacatgtgcaactactagacaagttgttaatgttgtaacaacaaagatagcacttaagggtggtaaaattgttaataattggttgaagcagttaattaaagttacacttgtgttcctttttgttgctgctattttctatttaataacacctgttcatgtcatgtctaaacatactgacttttcaagtgaaatcataggatacaaggctattgatggtggtgtcactcgtgacatagcatctacagatacttgttttgctaacaaacatgctgattttgacacatggtttagccagcgtggtggtagttatactaatgacaaagcttgcccattgattgctgcagtcataacaagagaagtgggttttgtcgtgcctggtttgcctggcacgatattacgcacaactaatggtgactttttgcatttcttacctagagtttttagtgcagttggtaacatctgttacacaccatcaaaacttatagagtacactgactttgcaacatcagcttgtgttttggctgctgaatgtacaatttttaaagatgcttctggtaagccagtaccatattgttatgataccaatgtactagaaggttctgttgcttatgaaagtttacgccctgacacacgttatgtgctcatggatggctctattattcaatttcctaacacctaccttgaaggttctgttagagtggtaacaacttttgattctgagtactgtaggcacggcacttgtgaaagatcagaagctggtgtttgtgtatctactagtggtagatgggtacttaacaatgattattacagatctttaccaggagttttctgtggtgtagatgctgtaaatttacttactaatatgtttacaccactaattcaacctattggtgctttggacatatcagcatctatagtagctggtggtattgtagctatcgtagtaacatgccttgcctactattttatgaggtttagaagagcttttggtgaatacagtcatgtagttgcctttaatactttactattccttatgtcattcactgtactctgtttaacaccagtttactcattcttacctggtgtttattctgttatttacttgtacttgacattttatcttactaatgatgtttcttttttagcacatattcagtggatggttatgttcacacctttagtacctttctggataacaattgcttatatcatttgtatttccacaaagcatttctattggttctttagtaattacctaaagagacgtgtagtctttaatggtgtttcctttagtacttttgaagaagctgcgctgtgcacctttttgttaaataaagaaatgtatctaaagttgcgtagtgatgtgctattacctcttacgcaatataatagatacttagctctttataataagtacaagtattttagtggagcaatggatacaactagctacagagaagctgcttgttgtcatctcgcaaaggctctcaatgacttcagtaactcaggttctgatgttctttaccaaccaccacaaacctctatcacctcagctgttttgcagagtggttttagaaaaatggcattcccatctggtaaagttgagggttgtatggtacaagtaacttgtggtacaactacacttaacggtctttggcttgatgacgtagtttactgtccaagacatgtgatctgcacctctgaagacatgcttaaccctaattatgaagatttactcattcgtaagtctaatcataatttcttggtacaggctggtaatgttcaactcagggttattggacattctatgcaaaattgtgtacttaagcttaaggttgatacagccaatcctaagacacctaagtataagtttgttcgcattcaaccaggacagactttttcagtgttagcttgttacaatggttcaccatctggtgtttaccaatgtgctatgaggcccaatttcactattaagggttcattccttaatggttcatgtggtagtgttggttttaacatagattatgactgtgtctctttttgttacatgcaccatatggaattaccaactggagttcatgctggcacagacttagaaggtaacttttatggaccttttgttgacaggcaaacagcacaagcagctggtacggacacaactattacagttaatgttttagcttggttgtacgctgctgttataaatggagacaggtggtttctcaatcgatttaccacaactcttaatgactttaaccttgtggctatgaagtacaattatgaacctctaacacaagaccatgttgacatactaggacctctttctgctcaaactggaattgccgttttagatatgtgtgcttcattaaaagaattactgcaaaatggtatgaatggacgtaccatattgggtagtgctttattagaagatgaatttacaccttttgatgttgttagacaatgctcaggtgttactttccaaagtgcagtgaaaagaacaatcaagggtacacaccactggttgttactcacaattttgacttcacttttagttttagtccagagtactcaatggtctttgttcttttttttgtatgaaaatgcctttttaccttttgctatgggtattattgctatgtctgcttttgcaatgatgtttgtcaaacataagcatgcatttctctgtttgtttttgttaccttctcttgccactgtagcttattttaatatggtctatatgcctgctagttgggtgatgcgtattatgacatggttggatatggttgatactagtttgtctggttttaagctaaaagactgtgttatgtatgcatcagctgtagtgttactaatccttatgacagcaagaactgtgtatgatgatggtgctaggagagtgtggacacttatgaatgtcttgacactcgtttataaagtttattatggtaatgctttagatcaagccatttccatgtgggctcttataatctctgttacttctaactactcaggtgtagttacaactgtcatgtttttggccagaggtattgtttttatgtgtgttgagtattgccctattttcttcataactggtaatacacttcagtgtataatgctagtttattgtttcttaggctatttttgtacttgttactttggcctcttttgtttactcaaccgctactttagactgactcttggtgtttatgattacttagtttctacacaggagtttagatatatgaattcacagggactactcccacccaagaatagcatagatgccttcaaactcaacattaaattgttgggtgttggtggcaaaccttgtatcaaagtagccactgtacagtctaaaatgtcagatgtaaagtgcacatcagtagtcttactctcagttttgcaacaactcagagtagaatcatcatctaaattgtgggctcaatgtgtccagttacacaatgacattctcttagctaaagatactactgaagcctttgaaaaaatggtttcactactttctgttttgctttccatgcagggtgctgtagacataaacaagctttgtgaagaaatgctggacaacagggcaaccttacaagctatagcctcagagtttagttcccttccatcatatgcagcttttgctactgctcaagaagcttatgagcaggctgttgctaatggtgattctgaagttgttcttaaaaagttgaagaagtctttgaatgtggctaaatctgaatttgaccgtgatgcagccatgcaacgtaagttggaaaagatggctgatcaagctatgacccaaatgtataaacaggctagatctgaggacaagagggcaaaagttactagtgctatgcagacaatgcttttcactatgcttagaaagttggataatgatgcactcaacaacattatcaacaatgcaagagatggttgtgttcccttgaacataatacctcttacaacagcagccaaactaatggttgtcataccagactataacacatataaaaatacgtgtgatggtacaacatttacttatgcatcagcattgtgggaaatccaacaggttgtagatgcagatagtaaaattgttcaacttagtgaaattagtatggacaattcacctaatttagcatggcctcttattgtaacagctttaagggccaattctgctgtcaaattacagaataatgagcttagtcctgttgcactacgacagatgtcttgtgctgccggtactacacaaactgcttgcactgatgacaatgcgttagcttactacaacacaacaaagggaggtaggtttgtacttgcactgttatccgatttacaggatttgaaatgggctagattccctaagagtgatggaactggtactatctatacagaactggaaccaccttgtaggtttgttacagacacacctaaaggtcctaaagtgaagtatttatactttattaaaggattaaacaacctaaatagaggtatggtacttggtagtttagctgccacagtacgtctacaagctggtaatgcaacagaagtgcctgccaattcaactgtattatctttctgtgcttttgctgtagatgctgctaaagcttacaaagattatctagctagtgggggacaaccaatcactaattgtgttaagatgttgtgtacacacactggtactggtcaggcaataacagttacaccggaagccaatatggatcaagaatcctttggtggtgcatcgtgttgtctgtactgccgttgccacatagatcatccaaatcctaaaggattttgtgacttaaaaggtaagtatgtacaaatacctacaacttgtgctaatgaccctgtgggttttacacttaaaaacacagtctgtaccgtctgcggtatgtggaaaggttatggctgtagttgtgatcaactccgcgaacccatgcttcagtcagctgatgcacaatcgtttttaaacgggtttgcggtgtaagtgcagcccgtcttacaccgtgcggcacaggcactagtactgatgtcgtatacagggcttttgacatctacaatgataaagtagctggttttgctaaattcctaaaaactaattgttgtcgcttccaagaaaaggacgaagatgacaatttaattgattcttactttgtagttaagagacacactttctctaactaccaacatgaagaaacaatttataatttacttaaggattgtccagctgttgctaaacatgacttctttaagtttagaatagacggtgacatggtaccacatatatcacgtcaacgtcttactaaatacacaatggcagacctcgtctatgctttaaggcattttgatgaaggtaattgtgacacattaaaagaaatacttgtcacatacaattgttgtgatgatgattatttcaataaaaaggactggtatgattttgtagaaaacccagatatattacgcgtatacgccaacttaggtgaacgtgtacgccaagctttgttaaaaacagtacaattctgtgatgccatgcgaaatgctggtattgttggtgtactgacattagataatcaagatctcaatggtaactggtatgatttcggtgatttcatacaaaccacgccaggtagtggagttcctgttgtagattcttattattcattgttaatgcctatattaaccttgaccagggctttaactgcagagtcacatgttgacactgacttaacaaagccttacattaagtgggatttgttaaaatatgacttcacggaagagaggttaaaactctttgaccgttattttaaatattgggatcagacataccacccaaattgtgttaactgtttggatgacagatgcattctgcattgtgcaaactttaatgttttattctctacagtgttcccacctacaagttttggaccactagtgagaaaaatatttgttgatggtgttccatttgtagtttcaactggataccacttcagagagctaggtgttgtacataatcaggatgtaaacttacatagctctagacttagttttaaggaattacttgtgtatgctgctgaccctgctatgcacgctgcttctggtaatctattactagataaacgcactacgtgcttttcagtagctgcacttactaacaatgttgcttttcaaactgtcaaacccggtaattttaacaaagacttctatgactttgctgtgtctaagggtttctttaaggaaggaagttctgttgaattaaaacacttcttctttgctcaggatggtaatgctgctatcagcgattatgactactatcgttataatctaccaacaatgtgtgatatcagacaactactatttgtagttgaagttgttgataagtactttgattgttacgatggtggctgtattaatgctaaccaagtcatcgtcaacaacctagacaaatcagctggttttccatttaataaatggggtaaggctagactttattatgattcaatgagttatgaggatcaagatgcacttttcgcatatacaaaacgtaatgtcatccctactataactcaaatgaatcttaagtatgccattagtgcaaagaatagagctcgcaccgtagctggtgtctctatctgtagtactatgaccaatagacagtttcatcaaaaattattgaaatcaatagccgccactagaggagctactgtagtaattggaacaagcaaattctatggtggttggcacaacatgttaaaaactgtttatagtgatgtagaaaaccctcaccttatgggttgggattatcctaaatgtgatagagccatgcctaacatgcttagaattatggcctcacttgttcttgctcgcaaacatacaacgtgttgtagcttgtcacaccgtttctatagattagctaatgagtgtgctcaagtattgagtgaaatggtcatgtgtggcggttcactatatgttaaaccaggtggaacctcatcaggagatgccacaactgcttatgctaatagtgtttttaacatttgtcaagctgtcacggccaatgttaatgcacttttatctactgatggtaacaaaattgccgataagtatgtccgcaatttacaacacagactttatgagtgtctctatagaaatagagatgttgacacagactttgtgaatgagttttacgcatatttgcgtaaacatttctcaatgatgatactctctgacgatgctgttgtgtgtttcaatagcacttatgcatctcaaggtctagtggctagcataaagaactttaagtcagttctttattatcaaaacaatgtttttatgtctgaagcaaaatgttggactgagactgaccttactaaaggacctcatgaattttgctctcaacatacaatgctagttaaacagggtgatgattatgtgtaccttccttacccagatccatcaagaatcctaggggccggctgttttgtagatgatatcgtaaaaacagatggtacacttatgattgaacggttcgtgtctttagctatagatgcttacccacttactaaacatcctaatcaggagtatgctgatgtctttcatttgtacttacaatacataagaaagctacatgatgagttaacaggacacatgttagacatgtattctgttatgcttactaatgataacacttcaaggtattgggaacctgagttttatgaggctatgtacacaccgcatacagtcttacaggctgttggggcttgtgttctttgcaattcacagacttcattaagatgtggtgcttgcatacgtagaccattcttatgttgtaaatgctgttacgaccatgtcatatcaacatcacataaattagtcttgtctgttaatccgtatgtttgcaatgctccaggttgtgatgtcacagatgtgactcaactttacttaggaggtatgagctattattgtaaatcacataaaccacccattagttttccattgtgtgctaatggacaagtttttggtttatataaaaatacatgtgttggtagcgataatgttactgactttaatgcaattgcaacatgtgactggacaaatgctggtgattacattttagctaacacctgtactgaaagactcaagctttttgcagcagaaacgctcaaagctactgaggagacatttaaactgtcttatggtattgctactgtacgtgaagtgctgtctgacagagaattacatctttcatgggaagttggtaaacctagaccaccacttaaccgaaattatgtctttactggttatcgtgtaactaaaaacagtaaagtacaaataggagagtacacctttgaaaaaggtgactatggtgatgctgttgtttaccgaggtacaacaacttacaaattaaatgttggtgattattttgtgctgacatcacatacagtaatgccattaagtgcacctacactagtgccacaagagcactatgttagaattactggcttatacccaacactcaatatctcagatgagttttctagcaatgttgcaaattatcaaaaggttggtatgcaaaagtattctacactccagggaccacctggtactggtaagagtcattttgctattggcctagctctctactacccttctgctcgcatagtgtatacagcttgctctcatgccgctgttgatgcactatgtgagaaggcattaaaatatttgcctatagataaatgtagtagaattatacctgcacgtgctcgtgtagagtgttttgataaattcaaagtgaattcaacattagaacagtatgtcttttgtactgtaaatgcattgcctgagacgacagcagatatagttgtctttgatgaaatttcaatggccacaaattatgatttgagtgttgtcaatgccagattacgtgctaagcactatgtgtacattggcgaccctgctcaattacctgcaccacgcacattgctaactaagggcacactagaaccagaatatttcaattcagtgtgtagacttatgaaaactataggtccagacatgttcctcggaacttgtcggcgttgtcctgctgaaattgttgacactgtgagtgctttggtttatgataataagcttaaagcacataaagacaaatcagctcaatgctttaaaatgttttataagggtgttatcacgcatgatgtttcatctgcaattaacaggccacaaataggcgtggtaagagaattccttacacgtaaccctgcttggagaaaagctgtctttatttcaccttataattcacagaatgctgtagcctcaaagattttgggactaccaactcaaactgttgattcatcacagggctcagaatatgactatgtcatattcactcaaaccactgaaacagctcactcttgtaatgtaaacagatttaatgttgctattaccagagcaaaagtaggcatactttgcataatgtctgatagagacctttatgacaagttgcaatttacaagtcttgaaattccacgtaggaatgtggcaactttacaagctgaaaatgtaacaggactctttaaagattgtagtaaggtaatcactgggttacatcctacacaggcacctacacacctcagtgttgacactaaattcaaaactgaaggtttatgtgttgacatacctggcatacctaaggacatgacctatagaagactcatctctatgatgggttttaaaatgaattatcaagttaatggttaccctaacatgtttatcacccgcgaagaagctataagacatgtacgtgcatggattggcttcgatgtcgaggggtgtcatgctactagagaagctgttggtaccaatttacctttacagctaggtttttctacaggtgttaacctagttgctgtacctacaggttatgttgatacacctaataatacagatttttccagagttagtgctaaaccaccgcctggagatcaatttaaacacctcataccacttatgtacaaaggacttccttggaatgtagtgcgtataaagattgtacaaatgttaagtgacacacttaaaaatctctctgacagagtcgtatttgtcttatgggcacatggctttgagttgacatctatgaagtattttgtgaaaataggacctgagcgcacctgttgtctatgtgatagacgtgccacatgcttttccactgcttcagacacttatgcctgttggcatcattctattggatttgattacgtctataatccgtttatgattgatgttcaacaatggggttttacaggtaacctacaaagcaaccatgatctgtattgtcaagtccatggtaatgcacatgtagctagttgtgatgcaatcatgactaggtgtctagctgtccacgagtgctttgttaagcgtgttgactggactattgaatatcctataattggtgatgaactgaagattaatgcggcttgtagaaaggttcaacacatggttgttaaagctgcattattagcagacaaattcccagttcttcacgacattggtaaccctaaagctattaagtgtgtacctcaagctgatgtagaatggaagttctatgatgcacagccttgtagtgacaaagcttataaaatagaagaattattctattcttatgccacacattctgacaaattcacagatggtgtatgcctattttggaattgcaatgtcgatagatatcctgctaattccattgtttgtagatttgacactagagtgctatctaaccttaacttgcctggttgtgatggtggcagtttgtatgtaaataaacatgcattccacacaccagcttttgataaaagtgcttttgttaatttaaaacaattaccatttttctattactctgacagtccatgtgagtctcatggaaaacaagtagtgtcagatatagattatgtaccactaaagtctgctacgtgtataacacgttgcaatttaggtggtgctgtctgtagacatcatgctaatgagtacagattgtatctcgatgcttataacatgatgatctcagctggctttagcttgtgggtttacaaacaatttgatacttataacctctggaacacttttacaagacttcagagtttagaaaatgtggcttttaatgttgtaaataagggacactttgatggacaacagggtgaagtaccagtttctatcattaataacactgtttacacaaaagttgatggtgttgatgtagaattgtttgaaaataaaacaacattacctgttaatgtagcatttgagctttgggctaagcgcaacattaaaccagtaccagaggtgaaaatactcaataatttgggtgtggacattgctgctaatactgtgatctgggactacaaaagagatgctccagcacatatatctactattggtgtttgttctatgactgacatagccaagaaaccaactgaaacgatttgtgcaccactcactgtcttttttgatggtagagttgatggtcaagtagacttatttagaaatgcccgtaatggtgttcttattacagaaggtagtgttaaaggtttacaaccatctgtaggtcccaaacaagctagtcttaatggagtcacattaattggagaagccgtaaaaacacagttcaattattataagaaagttgatggtgttgtccaacaattacctgaaacttactttactcagagtagaaatttacaagaatttaaacccaggagtcaaatggaaattgatttcttagaattagctatggatgaattcattgaacggtataaattagaaggctatgccttcgaacatatcgtttatggagattttagtcatagtcagttaggtggtttacatctactgattggactagctaaacgttttaaggaatcaccttttgaattagaagattttattcctatggacagtacagttaaaaactatttcataacagatgcgcaaacaggttcatctaagtgtgtgtgttctgttattgatttattacttgatgattttgttgaaataataaaatcccaagatttatctgtagtttctaaggttgtcaaagtgactattgactatacagaaatttcatttatgctttggtgtaaagatggccatgtagaaacattttacccaaaattacaatctagtcaagcgtggcaaccgggtgttgctatgcctaatctttacaaaatgcaaagaatgctattagaaaagtgtgaccttcaaaattatggtgatagtgcaacattacctaaaggcataatgatgaatgtcgcaaaatatactcaactgtgtcaatatttaaacacattaacattagctgtaccctataatatgagagttatacattttggtgctggttctgataaaggagttgcaccaggtacagctgttttaagacagtggttgcctacgggtacgctgcttgtcgattcagatcttaatgactttgtctctgatgcagattcaactttgattggtgattgtgcaactgtacatacagctaataaatgggatctcattattagtgatatgtacgaccctaagactaaaaatgttacaaaagaaaatgactctaaagagggttttttcacttacatttgtgggtttatacaacaaaagctagctcttggaggttccgtggctataaagataacagaacattcttggaatgctgatctttataagctcatgggacacttcgcatggtggacagcctttgttactaatgtgaatgcgtcatcatctgaagcatttttaattggatgtaattatcttggcaaaccacgcgaacaaatagatggttatgtcatgcatgcaaattacatattttggaggaatacaaatccaattcagttgtcttcctattctttatttgacatgagtaaatttccccttaaattaaggggtactgctgttatgtctttaaaagaaggtcaaatcaatgatatgattttatctcttcttagtaaaggtagacttataattagagaaaacaacagagttgttatttctagtgatgttcttgttaacaactaaacgaacaatgtttgtttttcttgttttattgccactagtctctagtcagtgtgttaatcttacaaccagaactcaattaccccctgcatacactaattctttcacacgtggtgtttattaccctgacaaagttttcagatcctcagttttacattcaactcaggacttgttcttacctttcttttccaatgttacttggttccatgctatacatgtctctgggaccaatggtactaagaggtttgataaccctgtcctaccatttaatgatggtgtttattttgcttccactgagaagtctaacataataagaggctggatttttggtactactttagattcgaagacccagtccctacttattgttaataacgctactaatgttgttattaaagtctgtgaatttcaattttgtaatgatccatttttgggtgtttattaccacaaaaacaacaaaagttggatggaaagtgagttcagagtttattctagtgcgaataattgcacttttgaatatgtctctcagccttttcttatggaccttgaaggaaaacagggtaatttcaaaaatcttagggaatttgtgtttaagaatattgatggttattttaaaatatattctaagcacacgcctattaatttagtgcgtgatctccctcagggtttttcggctttagaaccattggtagatttgccaataggtattaacatcactaggtttcaaactttacttgctttacatagaagttatttgactcctggtgattcttcttcaggttggacagctggtgctgcagcttattatgtgggttatcttcaacctaggacttttctattaaaatataatgaaaatggaaccattacagatgctgtagactgtgcacttgaccctctctcagaaacaaagtgtacgttgaaatccttcactgtagaaaaaggaatctatcaaacttctaactttagagtccaaccaacagaatctattgttagatttcctaatattacaaacttgtgcccttttggtgaagtttttaacgccaccagatttgcatctgtttatgcttggaacaggaagagaatcagcaactgtgttgctgattattctgtcctatataattccgcatcattttccacttttaagtgttatggagtgtctcctactaaattaaatgatctctgctttactaatgtctatgcagattcatttgtaattagaggtgatgaagtcagacaaatcgctccagggcaaactggaaagattgctgattataattataaattaccagatgattttacaggctgcgttatagcttggaattctaacaatcttgattctaaggttggtggtaattataattacctgtatagattgtttaggaagtctaatctcaaaccttttgagagagatatttcaactgaaatctatcaggccggtagcacaccttgtaatggtgttgaaggttttaattgttactttcctttacaatcatatggtttccaacccactaatggtgttggttaccaaccatacagagtagtagtactttcttttgaacttctacatgcaccagcaactgtttgtggacctaaaaagtctactaatttggttaaaaacaaatgtgtcaatttcaacttcaatggtttaacaggcacaggtgttcttactgagtctaacaaaaagtttctgcctttccaacaatttggcagagacattgctgacactactgatgctgtccgtgatccacagacacttgagattcttgacattacaccatgttcttttggtggtgtcagtgttataacaccaggaacaaatacttctaaccaggttgctgttctttatcaggatgttaactgcacagaagtccctgttgctattcatgcagatcaacttactcctacttggcgtgtttattctacaggttctaatgtttttcaaacacgtgcaggctgtttaataggggctgaacatgtcaacaactcatatgagtgtgacatacccattggtgcaggtatatgcgctagttatcagactcagactaattctcctcggcgggcacgtagtgtagctagtcaatccatcattgcctacactatgtcacttggtgcagaaaattcagttgcttactctaataactctattgccatacccacaaattttactattagtgttaccacagaaattctaccagtgtctatgaccaagacatcagtagattgtacaatgtacatttgtggtgattcaactgaatgcagcaatcttttgttgcaatatggcagtttttgtacacaattaaaccgtgctttaactggaatagctgttgaacaagacaaaaacacccaagaagtttttgcacaagtcaaacaaatttacaaaacaccaccaattaaagattttggtggttttaatttttcacaaatattaccagatccatcaaaaccaagcaagaggtcatttattgaagatctacttttcaacaaagtgacacttgcagatgctggcttcatcaaacaatatggtgattgccttggtgatattgctgctagagacctcatttgtgcacaaaagtttaacggccttactgttttgccacctttgctcacagatgaaatgattgctcaatacacttctgcactgttagcgggtacaatcacttctggttggacctttggtgcaggtgctgcattacaaataccatttgctatgcaaatggcttataggtttaatggtattggagttacacagaatgttctctatgagaaccaaaaattgattgccaaccaatttaatagtgctattggcaaaattcaagactcactttcttccacagcaagtgcacttggaaaacttcaagatgtggtcaaccaaaatgcacaagctttaaacacgcttgttaaacaacttagctccaattttggtgcaatttcaagtgttttaaatgatatcctttcacgtcttgacaaagttgaggctgaagtgcaaattgataggttgatcacaggcagacttcaaagtttgcagacatatgtgactcaacaattaattagagctgcagaaatcagagcttctgctaatcttgctgctactaaaatgtcagagtgtgtacttggacaatcaaaaagagttgatttttgtggaaagggctatcatcttatgtccttccctcagtcagcacctcatggtgtagtcttcttgcatgtgacttatgtccctgcacaagaaaagaacttcacaactgctcctgccatttgtcatgatggaaaagcacactttcctcgtgaaggtgtctttgtttcaaatggcacacactggtttgtaacacaaaggaatttttatgaaccacaaatcattactacagacaacacatttgtgtctggtaactgtgatgttgtaataggaattgtcaacaacacagtttatgatcctttgcaacctgaattagactcattcaaggaggagttagataaatattttaagaatcatacatcaccagatgttgatttaggtgacatctctggcattaatgcttcagttgtaaacattcaaaaagaaattgaccgcctcaatgaggttgccaagaatttaaatgaatctctcatcgatctccaagaacttggaaagtatgagcagtatataaaatggccatggtacatttggctaggttttatagctggcttgattgccatagtaatggtgacaattatgctttgctgtatgaccagttgctgtagttgtctcaagggctgttgttcttgtggatcctgctgcaaatttgatgaagacgactctgagccagtgctcaaaggagtcaaattacattacacataaacgaacttatggatttgtttatgagaatcttcacaattggaactgtaactttgaagcaaggtgaaatcaaggatgctactccttcagattttgttcgcgctactgcaacgataccgatacaagcctcactccctttcggatggcttattgttggcgttgcacttcttgctgtttttcagagcgcttccaaaatcataaccctcaaaaagagatggcaactagcactctccaagggtgttcactttgtttgcaacttgctgttgttgtttgtaacagtttactcacaccttttgctcgttgctgctggccttgaagccccttttctctatctttatgctttagtctacttcttgcagagtataaactttgtaagaataataatgaggctttggctttgctggaaatgccgttccaaaaacccattactttatgatgccaactattttctttgctggcatactaattgttacgactattgtataccttacaatagtgtaacttcttcaattgtcattacttcaggtgatggcacaacaagtcctatttctgaacatgactaccagattggtggttatactgaaaaatgggaatctggagtaaaagactgtgttgtattacacagttacttcacttcagactattaccagctgtactcaactcaattgagtacagacactggtgttgaacatgttaccttcttcatctacaataaaattgttgatgagcctgaagaacatgtccaaattcacacaatcgacggttcatccggagttgttaatccagtaatggaaccaatttatgatgaaccgacgacgactactagcgtgcctttgtaagcacaagctgatgagtacgaacttatgtactcattcgtttcggaagagacaggtacgttaatagttaatagcgtacttctttttcttgctttcgtggtattcttgctagttacactagccatccttactgcgcttcgattgtgtgcgtactgctgcaatattgttaacgtgagtcttgtaaaaccttctttttacgtttactctcgtgttaaaaatctgaattcttctagagttcctgatcttctggtctaaacgaactaaatattatattagtttttctgtttggaactttaattttagccatggcagattccaacggtactattaccgttgaagagcttaaaaagctccttgaacaatggaacctagtaataggtttcctattccttacatggatttgtcttctacaatttgcctatgccaacaggaataggtttttgtatataattaagttaattttcctctggctgttatggccagtaactttagcttgttttgtgcttgctgctgtttacagaataaattggatcaccggtggaattgctatcgcaatggcttgtcttgtaggcttgatgtggctcagctacttcattgcttctttcagactgtttgcgcgtacgcgttccatgtggtcattcaatccagaaactaacattcttctcaacgtgccactccatggcactattctgaccagaccgcttctagaaagtgaactcgtaatcggagctgtgatccttcgtggacatcttcgtattgctggacaccatctaggacgctgtgacatcaaggacctgcctaaagaaatcactgttgctacatcacgaacgctttcttattacaaattgggagcttcgcagcgtgtagcaggtgactcaggttttgctgcatacagtcgctacaggattggcaactataaattaaacacagaccattccagtagcagtgacaatattgctttgcttgtacagtaagtgacaacagatgtttcatctcgttgactttcaggttactatagcagagatattactaattattatgaggacttttaaagtttccatttggaatcttgattacatcataaacctcataattaaaaatttatctaagtcactaactgagaataaatattctcaattagatgaagagcaaccaatggagattgattaaacgaacatgaaaattattcttttcttggcactgataacactcgctacttgtgagctttatcactaccaagagtgtgttagaggtacaacagtacttttaaaagaaccttgctcttctggaacatacgagggcaattcaccatttcatcctctagctgataacaaatttgcactgacttgctttagcactcaatttgcttttgcttgtcctgacggcgtaaaacacgtctatcagttacgtgccagatcagtttcacctaaactgttcatcagacaagaggaagttcaagaactttactctccaatttttcttattgttgcggcaatagtgtttataacactttgcttcacactcaaaagaaagacagaatgattgaactttcattaattgacttctatttgtgctttttagcctttctgctattccttgttttaattatgcttattatcttttggttctcacttgaactgcaagatcataatgaaacttgtcacgcctaaacgaacatgaaatttcttgttttcttaggaatcatcacaactgtagctgcatttcaccaagaatgtagtttacagtcatgtactcaacatcaaccatatgtagttgatgacccgtgtcctattcacttctattctaaatggtatattagagtaggagctagaaaatcagcacctttaattgaattgtgcgtggatgaggctggttctaaatcacccattcagtacatcgatatcggtaattatacagtttcctgtttaccttttacaattaattgccaggaacctaaattgggtagtcttgtagtgcgttgttcgttctatgaagactttttagagtatcatgacgttcgtgttgttttagatttcatctaaacgaacaaactaaaatgtctgataatggaccccaaaatcagcgaaatgcaccccgcattacgtttggtggaccctcagattcaactggcagtaaccagaatggagaacgcagtggggcgcgatcaaaacaacgtcggccccaaggtttacccaataatactgcgtcttggttcaccgctctcactcaacatggcaaggaagaccttaaattccctcgaggacaaggcgttccaattaacaccaatagcagtccagatgaccaaattggctactaccgaagagctaccagacgaattcgtggtggtgacggtaaaatgaaagatctcagtccaagatggtatttctactacctaggaactgggccagaagctggacttccctatggtgctaacaaagacggcatcatatgggttgcaactgagggagccttgaatacaccaaaagatcacattggcacccgcaatcctgctaacaatgctgcaatcgtgctacaacttcctcaaggaacaacattgccaaaaggcttctacgcagaagggagcagaggcggcagtcaagcctcttctcgttcctcatcacgtagtcgcaacagttcaagaaattcaactccaggcagcagtaggggaacttctcctgctagaatggctggcaatggcggtgatgctgctcttgctttgctgctgcttgacagattgaaccagcttgagagcaaaatgtctggtaaaggccaacaacaacaaggccaaactgtcactaagaaatctgctgctgaggcttctaagaagcctcggcaaaaacgtactgccactaaagcatacaatgtaacacaagctttcggcagacgtggtccagaacaaacccaaggaaattttggggaccaggaactaatcagacaaggaactgattacaaacattggccgcaaattgcacaatttgcccccagcgcttcagcgttcttcggaatgtcgcgcattggcatggaagtcacaccttcgggaacgtggttgacctacacaggtgccatcaaattggatgacaaagatccaaatttcaaagatcaagtcattttgctgaataagcatattgacgcatacaaaacattcccaccaacagagcctaaaaaggacaaaaagaagaaggctgatgaaactcaagccttaccgcagagacagaagaaacagcaaactgtgactcttcttcctgctgcagatttggatgatttctccaaacaattgcaacaatccatgagcagtgctgactcaactcaggcctaaactcatgcagaccacacaaggcagatgggctatataaacgttttcgcttttccgtttacgatatatagtctactcttgtgcagaatgaattctcgtaactacatagcacaagtagatgtagttaactttaatctcacatagcaatctttaatcagtgtgtaacattagggaggacttgaaagagccaccacattttcaccgaggccacgcggagtacgatcgagtgtacagtgaacaatgctagggagagctgcctatatggaagagccctaatgtgtaaaattaattttagtagtgctatccccatgtgattttaatagcttcttaggagaatgacaaaaaaaaaaaaaaaaaaaaaaaaaaaaaaaaa

SEQ ID NO: 2 - DNA, 29876 bp, SARS-CoV-2
attaaaggtttataccttcccaggtaacaaaccaaccaactttcgatctcttgtagatctgttctctaaacgaactttaaaatctgtgtggctgtcactcggctgcatgcttagtgcactcacgcagtataattaataactaattactgtcgttgacaggacacgagtaactcgtctatcttctgcaggctgcttacggtttcgtccgtgttgcagccgatcatcagcacatctaggtttcgtccgggtgtgaccgaaaggtaagatggagagccttgtccctggtttcaacgagaaaacacacgtccaactcagtttgcctgttttacaggttcgcgacgtgctcgtacgtggctttggagactccgtggaggaggtcttatcagaggcacgtcaacatcttaaagatggcacttgtggcttagtagaagttgaaaaaggcgttttgcctcaacttgaacagccctatgtgttcatcaaacgttcggatgctcgaactgcacctcatggtcatgttatggttgagctggtagcagaactcgaaggcattcagtacggtcgtagtggtgagacacttggtgtccttgtccctcatgtgggcgaaataccagtggcttaccgcaaggttcttcttcgtaagaacggtaataaaggagctggtggccatagttacggcgccgatctaaagtcatttgacttaggcgacgagcttggcactgatccttatgaagattttcaagaaaactggaacactaaacatagcagtggtgttacccgtgaactcatgcgtgagcttaacggaggggcatacactcgctatgtcgataacaacttctgtggccctgatggctaccctcttgagtgcattaaagaccttctagcacgtgctggtaaagcttcatgcactttgtccgaacaactggactttattgacactaagaggggtgtatactgctgccgtgaacatgagcatgaaattgcttggtacacggaacgttctgaaaagagctatgaattgcagacaccttttgaaattaaattggcaaagaaatttgacaccttcaatggggaatgtccaaattttgtatttcccttaaattccataatcaagactattcaaccaagggttgaaaagaaaaagcttgatggctttatgggtagaattcgatctgtctatccagttgcgtcaccaaatgaatgcaaccaaatgtgcctttcaactctcatgaagtgtgatcattgtggtgaaacttcatggcagacgggcgattttgttaaagccacttgcgaattttgtggcactgagaatttgactaaagaaggtgccactacttgtggttacttaccccaaaatgctgttgttaaaatttattgtccagcatgtcacaattcagaagtaggacctgagcatagtcttgccgaataccataatgaatctggcttgaaaaccattcttcgtaagggtggtcgcactattgcctttggaggctgtgtgttctcttatgttggttgccataacaagtgtgcctattgggttccacgtgctagcgctaacataggttgtaaccatacaggtgttgttggagaaggttccgaaggtcttaatgacaaccttcttgaaatactccaaaaagagaaagtcaacatcaatattgttggtgactttaaacttaatgaagagatcgccattattttggcatctttttctgcttccacaagtgcttttgtggaaactgtgaaaggtttggattataaagcattcaaacaaattgttgaatcctgtggtaattttaaagttacaaaaggaaaagctaaaaaaggtgcctggaatattggtgaacagaaatcaatactgagtcctctttatgcatttgcatcagaggctgctcgtgttgtacgatcaattttctcccgcactcttgaaactgctcaaaattctgtgcgtgttttacagaaggccgctataacaatactagatggaatttcacagtattcactgagactcattgatgctatgatgttcacatctgatttggctactaacaatctagttgtaatggcctacattacaggtggtgttgttcagttgacttcgcagtggctaactaacatctttggcactgtttatgaaaaactcaaacccgtccttgattggcttgaagagaagtttaaggaaggtgtagagtttcttagagacggttgggaaattgttaaatttatctcaacctgtgcttgtgaaattgtcggtggacaaattgtcacctgtgcaaaggaaattaaggagagtgttcagacattctttaagcttgtaaataaatttttggctttgtgtgctgactctatcattattggtggagctaaacttaaagccttgaatttaggtgaaacatttgtcacgcactcaaagggattgtacagaaagtgtgttaaatccagagaagaaactggcctactcatgcctctaaaagccccaaaagaaattatcttcttagagggagaaacacttcccacagaagtgttaacagaggaagttgtcttgaaaactggtgatttacaaccattagaacaacctactagtgaagctgttgaagctccattggttggtacaccagtttgtattaacgggcttatgttgctcgaaatcaaagacacagaaaagtactgtgcccttgcacctaatatgatggtaacaaacaataccttcacactcaaaggcggtgcaccaacaaaggttacttttggtgatgacactgtgatagaagtgcaaggttacaagagtgtgaatatcacttttgaacttgatgaaaggattgataaagtacttaatgagaagtgctctgcctatacagttgaactcggtacagaagtaaatgagttcgcctgtgttgtggcagatgctgtcataaaaactttgcaaccagtatctgaattacttacaccactgggcattgatttagatgagtggagtatggctacatactacttatttgatgagtctggtgagtttaaattggcttcacatatgtattgttctttctaccctccagatgaggatgaagaagaaggtgattgtgaagaagaagagtttgagccatcaactcaatatgagtatggtactgaagatgattaccaaggtaaacctttggaatttggtgccacttctgctgctcttcaacctgaagaagagcaagaagaagattggttagatgatgatagtcaacaaactgttggtcaacaagacggcagtgaggacaatcagacaactactattcaaacaattgttgaggttcaacctcaattagagatggaacttacaccagttgttcagactattgaagtgaatagttttagtggttatttaaaacttactgacaatgtatacattaaaaatgcagacattgtggaagaagctaaaaaggtaaaaccaacagtggttgttaatgcagccaatgtttaccttaaacatggaggaggtgttgcaggagccttaaataaggctactaacaatgccatgcaagttgaatctgatgattacatagctactaatggaccacttaaagtgggtggtagttgtgttttaagcggacacaatcttgctaaacactgtcttcatgttgtcggcccaaatgttaacaaaggtgaagacattcaacttcttaagagtgcttatgaaaattttaatcagcacgaagttctacttgcaccattattatcagctggtatttttggtgctgaccctatacattctttaagagtttgtgtagatactgttcgcacaaatgtctacttagctgtctttgataaaaatctctatgacaaacttgtttcaagctttttggaaatgaagagtgaaaagcaagttgaacaaaagatcgctgagattcctaaagaggaagttaagccatttataactgaaagtaaaccttcagttgaacagagaaaacaagatgataagaaaatcaaagcttgtgttgaagaagttacaacaactctggaagaaactaagttcctcacagaaaacttgttactttatattgacattaatggcaatcttcatccagattctgccactcttgttagtgacattgacatcactttcttaaagaaagatgctccatatatagtgggtgatgttgttcaagagggtgttttaactgctgtggttatacctactaaaaaggctggtggcactactgaaatgctagcgaaagctttgagaaaagtgccaacagacaattatataaccacttacccgggtcagggtttaaatggttacactgtagaggaggcaaagacagtgcttaaaaagtgtaaaagtgccttttacattctaccatctattatctctaatgagaagcaagaaattcttggaactgtttcttggaatttgcgagaaatgcttgcacatgcagaagaaacacgcaaattaatgcctgtctgtgtggaaactaaagccatagtttcaactatacagcgtaaatataagggtattaaaatacaagagggtgtggttgattatggtgctagattttacttttacaccagtaaaacaactgtagcgtcacttatcaacacacttaacgatctaaatgaaactcttgttacaatgccacttggctatgtaacacatggcttaaatttggaagaagctgctcggtatatgagatctctcaaagtgccagctacagtttctgtttcttcacctgatgctgttacagcgtataatggttatcttacttcttcttctaaaacacctgaagaacattttattgaaaccatctcacttgctggttcctataaagattggtcctattctggacaatctacacaactaggtatagaatttcttaagagaggtgataaaagtgtatattacactagtaatcctaccacattccacctagatggtgaagttatcacctttgacaatcttaagacacttctttctttgagagaagtgaggactattaaggtgtttacaacagtagacaacattaacctccacacgcaagttgtggacatgtcaatgacatatggacaacagtttggtccaacttatttggatggagctgatgttactaaaataaaacctcataattcacatgaaggtaaaacattttatgttttacctaatgatgacactctacgtgttgaggcttttgagtactaccacacaactgatcctagttttctgggtaggtacatgtcagcattaaatcacactaaaaagtggaaatacccacaagttaatggtttaacttctattaaatgggcagataacaactgttatcttgccactgcattgttaacactccaacaaatagagttgaagtttaatccacctgctctacaagatgcttattacagagcaagggctggtgaagctgctaacttttgtgcacttatcttagcctactgtaataagacagtaggtgagttaggtgatgttagagaaacaatgagttacttgtttcaacatgccaatttagattcttgcaaaagagtcttgaacgtggtgtgtaaaacttgtggacaacagcagacaacccttaagggtgtagaagctgttatgtacatgggcacactttcttatgaacaatttaagaaaggtgttcagataccttgtacgtgtggtaaacaagctacaaaatatctagtacaacaggagtcaccttttgttatgatgtcagcaccacctgctcagtatgaacttaagcatggtacatttacttgtgctagtgagtacactggtaattaccagtgtggtcactataaacatataacttctaaagaaactttgtattgcatagacggtgctttacttacaaagtcctcagaatacaaaggtcctattacggatgttttctacaaagaaaacagttacacaacaaccataaaaccagttacttataaattggatggtgttgtttgtacagaaattgaccctaagttggacaattattataagaaagacaattcttatttcacagagcaaccaattgatcttgtaccaaaccaaccatatccaaacgcaagcttcgataattttaagtttgtatgtgataatatcaaatttgctgatgatttaaaccagttaactggttataagaaacctgcttcaagagagcttaaagttacatttttccctgacttaaatggtgatgtggtggctattgattataaacactacacaccctcttttaagaaaggagctaaattgttacataaacctattgtttggcatgttaacaatgcaactaataaagccacgtataaaccaaatacctggtgtatacgttgtctttggagcacaaaaccagttgaaacatcaaattcgtttgatgtactgaagtcagaggacgcgcagggaatggataatcttgcctgcgaagatctaaaaccagtctctgaagaagtagtggaaaatcctaccatacagaaagacgttcttgagtgtaatgtgaaaactaccgaagttgtaggagacattatacttaaaccagcaaataatagtttaaaaattacagaagaggttggccacacagatctaatggctgcttatgtagacaattctagtcttactattaagaaacctaatgaattatctagagtattaggtttgaaaacccttgctactcatggtttagctgctgttaatagtgtcccttgggatactatagctaattatgctaagccttttcttaacaaagttgttagtacaactactaacatagttacacggtgtttaaaccgtgtttgtactaattatatgccttatttctttactttattgctacaattgtgtacttttactagaagtacaaattctagaattaaagcatctatgccgactactatagcaaagaatactgttaagagtgtcggtaaattttgtctagaggcttcatttaattatttgaagtcacctaatttttctaaactgataaatattataatttggtttttactattaagtgtttgcctaggttctttaatctactcaaccgctgctttaggtgttttaatgtctaatttaggcatgccttcttactgtactggttacagagaaggctatttgaactctactaatgtcactattgcaacctactgtactggttctataccttgtagtgtttgtcttagtggtttagattctttagacacctatccttctttagaaactatacaaattaccatttcatcttttaaatgggatttaactgcttttggcttagttgcagagtggtttttggcatatattcttttcactaggtttttctatgtacttggattggctgcaatcatgcaattgtttttcagctattttgcagtacattttattagtaattcttggcttatgtggttaataattaatcttgtacaaatggccccgatttcagctatggttagaatgtacatcttctttgcatcattttattatgtatggaaaagttatgtgcatgttgtagacggttgtaattcatcaacttgtatgatgtgttacaaacgtaatagagcaacaagagtcgaatgtacaactattgttaatggtgttagaaggtccttttatgtctatgctaatggaggtaaaggcttttgcaaactacacaattggaattgtgttaattgtgatacattctgtgctggtagtacatttattagtgatgaagttgcgagagacttgtcactacagtttaaaagaccaataaatcctactgaccagtcttcttacatcgttgatagtgttacagtgaagaatggttccatccatctttactttgataaagctggtcaaaagacttatgaaagacattctctctctcattttgttaacttagacaacctgagagctaataacactaaaggttcattgcctattaatgttatagtttttgatggtaaatcaaaatgtgaagaatcatctgcaaaatcagcgtctgtttactacagtcagcttatgtgtcaacctatactgttactagatcaggcattagtgtctgatgttggtgatagtgcggaagttgcagttaaaatgtttgatgcttacgttaatacgttttcatcaacttttaacgtaccaatggaaaaactcaaaacactagttgcaactgcagaagctgaacttgcaaagaatgtgtccttagacaatgtcttatctacttttatttcagcagctcggcaagggtttgttgattcagatgtagaaactaaagatgttgttgaatgtcttaaattgtcacatcaatctgacatagaagttactggcgatagttgtaataactatatgctcacctataacaaagttgaaaacatgacaccccgtgaccttggtgcttgtattgactgtagtgcgcgtcatattaatgcgcaggtagcaaaaagtcacaacattgctttgatatggaacgttaaagatttcatgtcattgtctgaacaactacgaaaacaaatacgtagtgctgctaaaaagaataacttaccttttaagttgacatgtgcaactactagacaagttgttaatgttgtaacaacaaagatagcacttaagggtggtaaaattgttaataattggttgaagcagttaattaaagttacacttgtgttcctttttgttgctgctattttctatttaataacacctgttcatgtcatgtctaaacatactgacttttcaagtgaaatcataggatacaaggctattgatggtggtgtcactcgtgacatagcatctacagatacttgttttgctaacaaacatgctgattttgacacatggtttagccagcgtggtggtagttatactaatgacaaagcttgcccattgattgctgcagtcataacaagagaagtgggttttgtcgtgcctggtttgcctggcacgatattacgcacaactaatggtgactttttgcatttcttacctagagtttttagtgcagttggtaacatctgttacacaccatcaaaacttatagagtacactgactttgcaacatcagcttgtgttttggctgctgaatgtacaatttttaaagatgcttctggtaagccagtaccatattgttatgataccaatgtactagaaggttctgttgcttatgaaagtttacgccctgacacacgttatgtgctcatggatggctctattattcaatttcctaacacctaccttgaaggttctgttagagtggtaacaacttttgattctgagtactgtaggcacggcacttgtgaaagatcagaagctggtgtttgtgtatctactagtggtagatgggtacttaacaatgattattacagatctttaccaggagttttctgtggtgtagatgctgtaaatttacttactaatatgtttacaccactaattcaacctattggtgctttggacatatcagcatctatagtagctggtggtattgtagctatcgtagtaacatgccttgcctactattttatgaggtttagaagagcttttggtgaatacagtcatgtagttgcctttaatactttactattccttatgtcattcactgtactctgtttaacaccagtttactcattcttacctggtgtttattctgttatttacttgtacttgacattttatcttactaatgatgtttcttttttagcacatattcagtggatggttatgttcacacctttagtacctttctggataacaattgcttatatcatttgtatttccacaaagcatttctattggttctttagtaattacctaaagagacgtgtagtctttaatggtgtttcctttagtacttttgaagaagctgcgctgtgcacctttttgttaaataaagaaatgtatctaaagttgcgtagtgatgtgctattacctcttacgcaatataatagatacttagctctttataataagtacaagtattttagtggagcaatggatacaactagctacagagaagctgcttgttgtcatctcgcaaaggctctcaatgacttcagtaactcaggttctgatgttctttaccaaccaccacaaacctctatcacctcagctgttttgcagagtggttttagaaaaatggcattcccatctggtaaagttgagggttgtatggtacaagtaacttgtggtacaactacacttaacggtctttggcttgatgacgtagtttactgtccaagacatgtgatctgcacctctgaagacatgcttaaccctaattatgaagatttactcattcgtaagtctaatcataatttcttggtacaggctggtaatgttcaactcagggttattggacattctatgcaaaattgtgtacttaagcttaaggttgatacagccaatcctaagacacctaagtataagtttgttcgcattcaaccaggacagactttttcagtgttagcttgttacaatggttcaccatctggtgtttaccaatgtgctatgaggcccaatttcactattaagggttcattccttaatggttcatgtggtagtgttggttttaacatagattatgactgtgtctctttttgttacatgcaccatatggaattaccaactggagttcatgctggcacagacttagaaggtaacttttatggaccttttgttgacaggcaaacagcacaagcagctggtacggacacaactattacagttaatgttttagcttggttgtacgctgctgttataaatggagacaggtggtttctcaatcgatttaccacaactcttaatgactttaaccttgtggctatgaagtacaattatgaacctctaacacaagaccatgttgacatactaggacctctttctgctcaaactggaattgccgttttagatatgtgtgcttcattaaaagaattactgcaaaatggtatgaatggacgtaccatattgggtagtgctttattagaagatgaatttacaccttttgatgttgttagacaatgctcaggtgttactttccaaagtgcagtgaaaagaacaatcaagggtacacaccactggttgttactcacaattttgacttcacttttagttttagtccagagtactcaatggtctttgttcttttttttttatgaaaatgcctttttaccttttgctatgggtattattgctatgtctgcttttgcaatgatgtttgtcaaacataagcatgcatttctctgtttgtttttgttaccttctcttgccactgtagcttattttaatatggtctatatgcctgctagttgggtgatgcgtattatgacatggttggatatggttgatactagtttgtctggttttaagctaaaagactgtgttatgtatgcatcagctgtagtgttactaatccttatgacagcaagaactgtgtatgatgatggtgctaggagagtgtggacacttatgaatgtcttgacactcgtttataaagtttattatggtaatgctttagatcaagccatttccatgtgggctcttataatctctgttacttctaactactcaggtgtagttacaactgtcatgtttttggccagaggtattgtttttatgtgtgttgagtattgccctattttcttcataactggtaatacacttcagtgtataatgctagtttattgtttcttaggctatttttgtacttgttactttggcctcttttgtttactcaaccgctactttagactgactcttggtgtttatgattacttagtttctacacaggagtttagatatatgaattcacagggactactcccacccaagaatagcatagatgccttcaaactcaacattaaattgttgggtgttggtggcaaaccttgtatcaaagtagccactgtacagtctaaaatgtcagatgtaaagtgcacatcagtagtcttactctcagttttgcaacaactcagagtagaatcatcatctaaattgtgggctcaatgtgtccagttacacaatgacattctcttagctaaagatactactgaagcctttgaaaaaatggtttcactactttctgttttgctttccatgcagggtgctgtagacataaacaagctttgtgaagaaatgctggacaacagggcaaccttacaagctatagcctcagagtttagttcccttccatcatatgcagcttttgctactgctcaagaagcttatgagcaggctgttgctaatggtgattctgaagttgttcttaaaaagttgaagaagtctttgaatgtggctaaatctgaatttgaccgtgatgcagccatgcaacgtaagttggaaaagatggctgatcaagctatgacccaaatgtataaacaggctagatctgaggacaagagggcaaaagttactagtgctatgcagacaatgcttttcactatgcttagaaagttggataatgatgcactcaacaacattatcaacaatgcaagagatggttgtgttcccttgaacataatacctcttacaacagcagccaaactaatggttgtcataccagactataacacatataaaaatacgtgtgatggtacaacatttacttatgcatcagcattgtgggaaatccaacaggttgtagatgcagatagtaaaattgttcaacttagtgaaattagtatggacaattcacctaatttagcatggcctcttattgtaacagctttaagggccaattctgctgtcaaattacagaataatgagcttagtcctgttgcactacgacagatgtcttgtgctgccggtactacacaaactgcttgcactgatgacaatgcgttagcttactacaacacaacaaagggaggtaggtttgtacttgcactgttatccgatttacaggatttgaaatgggctagattccctaagagtgatggaactggtactatctatacagaactggaaccaccttgtaggtttgttacagacacacctaaaggtcctaaagtgaagtatttatactttattaaaggattaaacaacctaaatagaggtatggtacttggtagtttagctgccacagtacgtctacaagctggtaatgcaacagaagtgcctgccaattcaactgtattatctttctgtgcttttgctgtagatgctgctaaagcttacaaagattatctagctagtgggggacaaccaatcactaattgtgttaagatgttgtgtacacacactggtactggtcaggcaataacagttacaccggaagccaatatggatcaagaatcctttggtggtgcatcgtgttgtctgtactgccgttgccacatagatcatccaaatcctaaaggattttgtgacttaaaaggtaagtatgtacaaatacctacaacttgtgctaatgaccctgtgggttttacacttaaaaacacagtctgtaccgtctgcggtatgtggaaaggttatggctgtagttgtgatcaactccgcgaacccatgcttcagtcagctgatgcacaatcgtttttaaacgggtttgcggtgtaagtgcagcccgtcttacaccgtgcggcacaggcactagtactgatgtcgtatacagggcttttgacatctacaatgataaagtagctggttttgctaaattcctaaaaactaattgttgtcgcttccaagaaaaggacgaagatgacaatttaattgattcttactttgtagttaagagacacactttctctaactaccaacatgaagaaacaatttataatttacttaaggattgtccagctgttgctaaacatgacttctttaagtttagaatagacggtgacatggtaccacatatatcacgtcaacgtcttactaaatacacaatggcagacctcgtctatgctttaaggcattttgatgaaggtaattgtgacacattaaaagaaatacttgtcacatacaattgttgtgatgatgattatttcaataaaaaggactggtatgattttgtagaaaacccagatatattacgcgtatacgccaacttaggtgaacgtgtacgccaagctttgttaaaaacagtacaattctgtgatgccatgcgaaatgctggtattgttggtgtactgacattagataatcaagatctcaatggtaactggtatgatttcggtgatttcatacaaaccacgccaggtagtggagttcctgttgtagattcttattattcattgttaatgcctatattaaccttgaccagggctttaactgcagagtcacatgttgacactgacttaacaaagccttacattaagtgggatttgttaaaatatgacttcacggaagagaggttaaaactctttgaccgttattttaaatattgggatcagacataccacccaaattgtgttaactgtttggatgacagatgcattctgcattgtgcaaactttaatgttttattctctacagtgttcccacctacaagttttggaccactagtgagaaaaatatttgttgatggtgttccatttgtagtttcaactggataccacttcagagagctaggtgttgtacataatcaggatgtaaacttacatagctctagacttagttttaaggaattacttgtgtatgctgctgaccctgctatgcacgctgcttctggtaatctattactagataaacgcactacgtgcttttcagtagctgcacttactaacaatgttgcttttcaaactgtcaaacccggtaattttaacaaagacttctatgactttgctgtgtctaagggtttctttaaggaaggaagttctgttgaattaaaacacttcttctttgctcaggatggtaatgctgctatcagcgattatgactattatcgttataatctaccaacaatgtgtgatatcagacaactactatttgtagttgaagttgttgataagtactttgattgttacgatggtggctgtattaatgctaaccaagtcatcgtcaacaacctagacaaatcagctggttttccatttaataaatggggtaaggctagactttattatgattcaatgagttatgaggatcaagatgcacttttcgcatatacaaaacgtaatgtcatccctactataactcaaatgaatcttaagtatgccattagtgcaaagaatagagctcgcaccgtagctggtgtctctatctgtagtactatgaccaatagacagtttcatcaaaaattattgaaatcaatagccgccactagaggagctactgtagtaattggaacaagcaaattctatggtggttggcacaacatgttaaaaactgtttatagtgatgtagaaaaccctcaccttatgggttgggattatcctaaatgtgatagagccatgcctaacatgcttagaattatggcctcacttgttcttgctcgcaaacatacaacgtgttgtagcttgtcacaccgtttctatagattagctaatgagtgtgctcaagtattgagtgaaatggtcatgtgtggcggttcactatatgttaaaccaggtggaacctcatcaggagatgccacaactgcttatgctaatagtgtttttaacatttgtcaagctgtcacggccaatgttaatgcacttttatctactgatggtaacaaaattgccgataagtatgtccgcaatttacaacacagactttatgagtgtctctatagaaatagagatgttgacacagactttgtgaatgagttttacgcatatttgcgtaaacatttctcaatgatgatactctctgacgatgctgttgtgtgtttcaatagcacttatgcatctcaaggtctagtggctagcataaagaactttaagtcagttctttattatcaaaacaatgtttttatgtctgaagcaaaatgttggactgagactgaccttactaaaggacctcatgaattttgctctcaacatacaatgctagttaaacagggtgatgattatgtgtaccttccttacccagatccatcaagaatcctaggggccggctgttttgtagatgatatcgtaaaaacagatggtacacttatgattgaacggttcgtgtctttagctatagatgcttacccacttactaaacatcctaatcaggagtatgctgatgtctttcatttgtacttacaatacataagaaagctacatgatgagttaacaggacacatgttagacatgtattctgttatgcttactaatgataacacttcaaggtattgggaacctgagttttatgaggctatgtacacaccgcatacagtcttacaggctgttggggcttgtgttctttgcaattcacagacttcattaagatgtggtgcttgcatacgtagaccattcttatgttgtaaatgctgttacgaccatgtcatatcaacatcacataaattagtcttgtctgttaatccgtatgtttgcaatgctccaggttgtgatgtcacagatgtgactcaactttacttaggaggtatgagctattattgtaaatcacataaaccacccattagttttccattgtgtgctaatggacaagtttttggtttatataaaaatacatgtgttggtagcgataatgttactgactttaatgcaattgcaacatgtgactggacaaatgctggtgattacattttagctaacacctgtactgaaagactcaagctttttgcagcagaaacgctcaaagctactgaggagacatttaaactgtcttatggtattgctactgtacgtgaagtgctgtctgacagagaattacatctttcatgggaagttggtaaacctagaccaccacttaaccgaaattatgtctttactggttatcgtgtaactaaaaacagtaaagtacaaataggagagtacacctttgaaaaaggtgactatggtgatgctgttgtttaccgaggtacaacaacttacaaattaaatgttggtgattattttgtgctgacatcacatacagtaatgccattaagtgcacctacactagtgccacaagagcactatgttagaattactggcttatacccaacactcaatatctcagatgagttttctagcaatgttgcaaattatcaaaaggttggtatgcaaaagtattctacactccagggaccacctggtactggtaagagtcattttgctattggcctagctctctactacccttctgctcgcatagtgtatacagcttgctctcatgccgctgttgatgcactatgtgagaaggcattaaaatatttgcctatagataaatgtagtagaattatacctgcacgcgctcgtgtagagtgttttgataaattcaaagtgaattcaacattagaacagtatgtcttttgtactgtaaatgcattgcctgagacgacagcagatatagttgtctttgatgaaatttcaatggccacaaattatgatttgagtgttgtcaatgccagattacgtgctaagcactatgtgtacattggcgaccctgctcaattacctgcaccacgcacattgctaactaagggcacactagaaccagaatatttcaattcagtgtgtagacttatgaaaactataggtccagacatgttcctcggaacttgtcggcgttgtcctgctgaaattgttgacactgtgagtgctttggtttatgataataagcttaaagcacataaagacaaatcagctcaatgctttaaaatgttttataagggtgttatcacgcatgatgtttcatctgcaattaacaggccacaaataggcgtggtaagagaattccttacacgtaaccctgcttggagaaaagctgtctttatttcaccttataattcacagaatgctgtagcctcaaagattttgggactaccaactcaaactgttgattcatcacagggctcagaatatgactatgtcatattcactcaaaccactgaaacagctcactcttgtaatgtaaacagatttaatgttgctattaccagagcaaaagtaggcatactttgcataatgtctgatagagacctttatgacaagttgcaatttacaagtcttgaaattccacgtaggaatgtggcaactttacaagctgaaaatgtaacaggactctttaaagattgtagtaaggtaatcactgggttacatcctacacaggcacctacacacctcagtgttgacactaaattcaaaactgaaggtttatgtgttgacatacctggcatacctaaggacatgacctatagaagactcatctctatgatgggttttaaaatgaattatcaagttaatggttaccctaacatgtttatcacccgcgaagaagctataagacatgtacgtgcatggattggcttcgatgtcgaggggtgtcatgctactagagaagctgttggtaccaatttacctttacagctaggtttttctacaggtgttaacctagttgctgtacctacaggttatgttgatacacctaataatacagatttttccagagttagtgctaaaccaccgcctggagatcaatttaaacacctcataccacttatgtacaaaggacttccttggaatgtagtgcgtataaagattgtacaaatgttaagtgacacacttaaaaatctctctgacagagtcgtatttgtcttatgggcacatggctttgagttgacatctatgaagtattttgtgaaaataggacctgagcgcacctgttgtctatgtgatagacgtgccacatgcttttccactgcttcagacacttatgcctgttggcatcattctattggatttgattacgtctataatccgtttatgattgatgttcaacaatggggttttacaggtaacctacaaagcaaccatgatctgtattgtcaagtccatggtaatgcacatgtagctagttgtgatgcaatcatgactaggtgtctagctgtccacgagtgctttgttaagcgtgttgactggactattgaatatcctataattggtgatgaactgaagattaatgcggcttgtagaaaggttcaacacatggttgttaaagctgcattattagcagacaaattcccagttcttcacgacattggtaaccctaaagctattaagtgtgtacctcaagctgatgtagaatggaagttctatgatgcacagccttgtagtgacaaagcttataaaatagaagaattattctattcttatgccacacattctgacaaattcacagatggtgtatgcctattttggaattgcaatgtcgatagatatcctgctaattccattgtttgtagatttgacactagagtgctatctaaccttaacttgcctggttgtgatggtggcagtttgtatgtaaataaacatgcattccacacaccagcttttgataaaagtgcttttgttaatttaaaacaattaccatttttctattactctgacagtccatgtgagtctcatggaaaacaagtagtgtcagatatagattatgtaccactaaagtctgctacgtgtataacacgttgcaatttaggtggtgctgtctgtagacatcatgctaatgagtacagattgtatctcgatgcttataacatgatgatctcagctggctttagcttgtgggtttacaaacaatttgatacttataacctctggaacacttttacaagacttcagagtttagaaaatgtggcttttaatgttgtaaataagggacactttgatggacaacagggtgaagtaccagtttctatcattaataacactgtttacacaaaagttgatggtgttgatgtagaattgtttgaaaataaaacaacattacctgttaatgtagcatttgagctttgggctaagcgcaacattaaaccagtaccagaggtgaaaatactcaataatttgggtgtggacattgctgctaatactgtgatctgggactacaaaagagatgctccagcacatatatctactattggtgtttgttctatgactgacatagccaagaaaccaactgaaacgatttgtgcaccactcactgtcttttttgatggtagagttgatggtcaagtagacttatttagaaatgcccgtaatggtgttcttattacagaaggtagtgttaaaggtttacaaccatctgtaggtcccaaacaagctagtcttaatggagtcacattaattggagaagccgtaaaaacacagttcaattattataagaaagttgatggtgttgtccaacaattacctgaaacttactttactcagagtagaaatttacaagaatttaaacccaggagtcaaatggaaattgatttcttagaattagctatggatgaattcattgaacggtataaattagaaggctatgccttcgaacatatcgtttatggagattttagtcatagtcagttaggtggtttacatctactgattggactagctaaacgttttaaggaatcaccttttgaattagaagattttattcctatggacagtacagttaaaaactatttcataacagatgcgcaaacaggttcatctaagtgtgtgtgttctgttattgatttattacttgatgattttgttgaaataataaaatcccaagatttatctgtagtttctaaggttgtcaaagtgactattgactatacagaaatttcatttatgctttggtgtaaagatggccatgtagaaacattttacccaaaattacaatctagtcaagcgtggcaaccgggtgttgctatgcctaatctttacaaaatgcaaagaatgctattagaaaagtgtgaccttcaaaattatggtgatagtgcaacattacctaaaggcataatgatgaatgtcgcaaaatatactcaactgtgtcaatatttaaacacattaacattagctgtaccctataatatgagagttatacattttggtgctggttctgataaaggagttgcaccaggtacagctgttttaagacagtggttgcctacgggtacgctgcttgtcgattcagatcttaatgactttgtctctgatgcagattcaactttgattggtgattgtgcaactgtacatacagctaataaatgggatctcattattagtgatatgtacgaccctaagactaaaaatgttacaaaagaaaatgactctaaagagggttttttcacttacatttgtgggtttatacaacaaaagctagctcttggaggttccgtggctataaagataacagaacattcttggaatgctgatctttataagctcatgggacacttcgcatggtggacagcctttgttactaatgtgaatgcgtcatcatctgaagcatttttaattggatgtaattatcttggcaaaccacgcgaacaaatagatggttatgtcatgcatgcaaattacatattttggaggaatacaaatccaattcagttgtcttcctattctttatttgacatgagtaaatttccccttaaattaaggggtactgctgttatgtctttaaaagaaggtcaaatcaatgatatgattttatctcttcttagtaaaggtagacttataattagagaaaacaacagagttgttatttctagtgatgttcttgttaacaactaaacgaacaatgtttgtttttcttgttttattgccactagtctctagtcagtgtgttaatcttacaaccagaactcaattaccccctgcatacactaattctttcacacgtggtgtttattaccctgacaaagttttcagatcctcagttttacattcaactcaggacttgttcttacctttcttttccaatgttacttggttccatgctatacatgtctctgggaccaatggtactaagaggtttgataaccctgtcctaccatttaatgatggtgtttattttgcttccactgagaagtctaacataataagaggctggatttttggtactactttagattcgaagacccagtccctacttattgttaataacgctactaatgttgttattaaagtctgtgaatttcaattttgtaatgatccatttttgggtgtttattaccacaaaaacaacaaaagttggatggaaagtgagttcagagtttattctagtgcgaataattgcacttttgaatatgtctctcagccttttcttatggaccttgaaggaaaacagggtaatttcaaaaatcttagggaatttgtgtttaagaatattgatggttattttaaaatatattctaagcacacgcctattaatttagtgcgtgatctccctcagggtttttcggctttagaaccattggtagatttgccaataggtattaacatcactaggtttcaaactttacttgctttacatagaagttatttgactcctggtgattcttcttcaggttggacagctggtgctgcagcttattatgtgggttatcttcaacctaggacttttctattaaaatataatgaaaatggaaccattacagatgctgtagactgtgcacttgaccctctctcagaaacaaagtgtacgttgaaatccttcactgtagaaaaaggaatctatcaaacttctaactttagagtccaaccaacagaatctattgttagatttcctaatattacaaacttgtgcccttttggtgaagtttttaacgccaccagatttgcatctgtttatgcttggaacaggaagagaatcagcaactgtgttgctgattattctgtcctatataattccgcatcattttccacttttaagtgttatggagtgtctcctactaaattaaatgatctctgctttactaatgtctatgcagattcatttgtaattagaggtgatgaagtcagacaaatcgctccagggcaaactggaaagattgctgattataattataaattaccagatgattttacaggctgcgttatagcttggaattctaacaatcttgattctaaggttggtggtaattataattacctgtatagattgtttaggaagtctaatctcaaaccttttgagagagatatttcaactgaaatctatcaggccggtagcacaccttgtaatggtgttgaaggttttaattgttactttcctttacaatcatatggtttccaacccactaatggtgttggttaccaaccatacagagtagtagtactttcttttgaacttctacatgcaccagcaactgtttgtggacctaaaaagtctactaatttggttaaaaacaaatgtgtcaatttcaacttcaatggtttaacaggcacaggtgttcttactgagtctaacaaaaagtttctgcctttccaacaatttggcagagacattgctgacactactgatgctgtccgtgatccacagacacttgagattcttgacattacaccatgttcttttggtggtgtcagtgttataacaccaggaacaaatacttctaaccaggttgctgttctttatcaggatgttaactgcacagaagtccctgttgctattcatgcagatcaacttactcctacttggcgtgtttattctacaggttctaatgtttttcaaacacgtgcaggctgtttaataggggctgaacatgtcaacaactcatatgagtgtgacatacccattggtgcaggtatatgcgctagttatcagactcagactaattctcctcggcgggcacgtagtgtagctagtcaatccatcattgcctacactatgtcacttggtgcagaaaattcagttgcttactctaataactctattgccatacccacaaattttactattagtgttaccacagaaattctaccagtgtctatgaccaagacatcagtagattgtacaatgtacatttgtggtgattcaactgaatgcagcaatcttttgttgcaatatggcagtttttgtacacaattaaaccgtgctttaactggaatagctgttgaacaagacaaaaacacccaagaagtttttgcacaagtcaaacaaatttacaaaacaccaccaattaaagattttggtggttttaatttttcacaaatattaccagatccatcaaaaccaagcaagaggtcatttattgaagatctacttttcaacaaagtgacacttgcagatgctggcttcatcaaacaatatggtgattgccttggtgatattgctgctagagacctcatttgtgcacaaaagtttaacggccttactgttttgccacctttgctcacagatgaaatgattgctcaatacacttctgcactgttagcgggtacaatcacttctggttggacctttggtgcaggtgctgcattacaaataccatttgctatgcaaatggcttataggtttaatggtattggagttacacagaatgttctctatgagaaccaaaaattgattgccaaccaatttaatagtgctattggcaaaattcaagactcactttcttccacagcaagtgcacttggaaaacttcaagatgtggtcaaccaaaatgcacaagctttaaacacgcttgttaaacaacttagctccaattttggtgcaatttcaagtgttttaaatgatatcctttcacgtcttgacaaagttgaggctgaagtgcaaattgataggttgatcacaggcagacttcaaagtttgcagacatatgtgactcaacaattaattagagctgcagaaatcagagcttctgctaatcttgctgctactaaaatgtcagagtgtgtacttggacaatcaaaaagagttgatttttgtggaaagggctatcatcttatgtccttccctcagtcagcacctcatggtgtagtcttcttgcatgtgacttatgtccctgcacaagaaaagaacttcacaactgctcctgccatttgtcatgatggaaaagcacactttcctcgtgaaggtgtctttgtttcaaatggcacacactggtttgtaacacaaaggaatttttatgaaccacaaatcattactacagacaacacatttgtgtctggtaactgtgatgttgtaataggaattgtcaacaacacagtttatgatcctttgcaacctgaattagactcattcaaggaggagttagataaatattttaagaatcatacatcaccagatgttgatttaggtgacatctctggcattaatgcttcagttgtaaacattcaaaaagaaattgaccgcctcaatgaggttgccaagaatttaaatgaatctctcatcgatctccaagaacttggaaagtatgagcagtatataaaatggccatggtacatttggctaggttttatagctggcttgattgccatagtaatggtgacaattatgctttgctgtatgaccagttgctgtagttgtctcaagggctgttgttcttgtggatcctgctgcaaatttgatgaagacgactctgagccagtgctcaaaggagtcaaattacattacacataaacgaacttatggatttgtttatgagaatcttcacaattggaactgtaactttgaagcaaggtgaaatcaaggatgctactccttcagattttgttcgcgctactgcaacgataccgatacaagcctcactccctttcggatggcttattgttggcgttgcacttcttgctgtttttcagagcgcttccaaaatcataaccctcaaaaagagatggcaactagcactctccaagggtgttcactttgtttgcaacttgctgttgttgtttgtaacagtttactcacaccttttgctcgttgctgctggccttgaagccccttttctctatctttatgctttagtctacttcttgcagagtataaactttgtaagaataataatgaggctttggctttgctggaaatgccgttccaaaaacccattactttatgatgccaactattttctttgctggcatactaattgttacgactattgtataccttacaatagtgtaacttcttcaattgtcattacttcaggtgatggcacaacaagtcctatttctgaacatgactaccagattggtggttatactgaaaaatgggaatctggagtaaaagactgtgttgtattacacagttacttcacttcagactattaccagctgtactcaactcaattgagtacagacactggtgttgaacatgttaccttcttcatctacaataaaattgttgatgagcctgaagaacatgtccaaattcacacaatcgacgtttcatccggagttgttaatccagtaatggaaccaatttatgatgaaccgacgacgactactagcgtgcctttgtaagcacaagctgatgagtacgaacttatgtactcattcgtttcggaagagacaggtacgttaatagttaatagcgtacttctttttcttgctttcgtggtattcttgctagttacactagccatccttactgcgcttcgattgtgtgcgtactgctgcaatattgttaacgtgagtcttgtaaaaccttctttttacgtttactctcgtgttaaaaatctgaattcttctagagttcctgatcttctggtctaaacgaactaaatattatattagtttttctgtttggaactttaattttagccatggcagattccaacggtactattaccgttgaagagcttaaaaagctccttgaacaatggaacctagtaataggtttcctattccttacatggatttgtcttctacaatttgcctatgccaacaggaataggtttttgtatataattaagttaattttcctctggctgttatggccagtaactttagcttgttttgtgcttgctgctgtttacagaataaattggatcaccggtggaattgctatcgcaatggcttgtcttgtaggcttgatgtggctcagctacttcattgcttctttcagactgtttgcgcgtacgcgttccatgtggtcattcaatccagaaactaacattcttctcaacgtgccactccatggcactattctgaccagaccgcttctagaaagtgaactcgtaatcggagctgtgatccttcgtggacatcttcgtattgctggacaccatctaggacgctgtgacatcaaggacctgcctaaagaaatcactgttgctacatcacgaacgctttcttattacaaattgggagcttcgcagcgtgtagcaggtgactcaggttttgctgcatacagtcgctacaggattggcaactataaattaaacacagaccattccagtagcagtgacaatattgctttgcttgtacagtaagtgacaacagatgtttcatctcgttgactttcaggttactatagcagagatattactaattattatgaggacttttaaagtttccatttggaatcttgattacatcataaacctcataattaaaaatttatctaagtcactaactgagaataaatattctcaattagatgaagagcaaccaatggagattgattaaacgaacatgaaaattattcttttcttggcactgataacactcgctacttgtgagctttatcactaccaagagtgtgttagaggtacaacagtacttttaaaagaaccttgctcttctggaacatacgagggcaattcaccatttcatcctctagctgataacaaatttgcactgacttgctttagcactcaatttgcttttgcttgtcctgacggcgtaaaacacgtctatcagttacgtgccagatcagtttcacctaaactgttcatcagacaagaggaagttcaagaactttactctccaatttttcttattgttgcggcaatagtgtttataacactttgcttcacactcaaaagaaagacagaatgattgaactttcattaattgacttctatttgtgctttttagcctttctgctattccttgttttaattatgcttattatcttttggttctcacttgaactgcaagatcataatgaaacttgtcacgcctaaacgaacatgaaatttcttgttttcttaggaatcatcacaactgtagctgcatttcaccaagaatgtagtttacagtcatgtactcaacatcaaccatatgtagttgatgacccgtgtcctattcacttctattctaaatggtatattagagtaggagctagaaaatcagcacctttaattgaattgtgcgtggatgaggctggttctaaatcacccattcagtacatcgatatcggtaattatacagtttcctgtttaccttttacaattaattgccaggaacctaaattgggtagtcttgtagtgcgttgttcgttctatgaagactttttagagtatcatgacgttcgtgttgttttagatttcatctaaacgaacaaactaaaatgtctgataatggaccccaaaatcagcgaaatgcaccccgcattacgtttggtggaccctcagattcaactggcagtaaccagaatggagaacgcagtggggcgcgatcaaaacaacgtcggccccaaggtttacccaataatactgcgtcttggttcaccgctctcactcaacatggcaaggaagaccttaaattccctcgaggacaaggcgttccaattaacaccaatagcagtccagatgaccaaattggctactaccgaagagctaccagacgaattcgtggtggtgacggtaaaatgaaagatctcagtccaagatggtatttctactacctaggaactgggccagaagctggacttccctatggtgctaacaaagacggcatcatatgggttgcaactgagggagccttgaatacaccaaaagatcacattggcacccgcaatcctgctaacaatgctgcaatcgtgctacaacttcctcaaggaacaacattgccaaaaggcttctacgcagaagggagcagaggcggcagtcaagcctcttctcgttcctcatcacgtagtcgcaacagttcaagaaattcaactccaggcagcagtaggggaacttctcctgctagaatggctggcaatggcggtgatgctgctcttgctttgctgctgcttgacagattgaaccagcttgagagcaaaatgtctggtaaaggccaacaacaacaaggccaaactgtcactaagaaatctgctgctgaggcttctaagaagcctcggcaaaaacgtactgccactaaagcatacaatgtaacacaagctttcggcagacgtggtccagaacaaacccaaggaaattttggggaccaggaactaatcagacaaggaactgattacaaacattggccgcaaattgcacaatttgcccccagcgcttcagcgttcttcggaatgtcgcgcattggcatggaagtcacaccttcgggaacgtggttgacctacacaggtgccatcaaattggatgacaaagatccaaatttcaaagatcaagtcattttgctgaataagcatattgacgcatacaaaacattcccaccaacagagcctaaaaaggacaaaaagaagaaggctgatgaaactcaagccttaccgcagagacagaagaaacagcaaactgtgactcttcttcctgctgcagatttggatgatttctccaaacaattgcaacaatccatgagcagtgctgactcaactcaggcctaaactcatgcagaccacacaaggcagatgggctatataaacgttttcgcttttccgtttacgatatatagtctactcttgtgcagaatgaattctcgtaactacatagcacaagtagatgtagttaactttaatctcacatagcaatctttaatcagtgtgtaacattagggaggacttgaaagagccaccacattttcaccgaggccacgcggagtacgatcgagtgtacagtgaacaatgctagggagagctgcctatatggaagagccctaatgtgtaaaattaattttagtagtgctatccccatgtgattttaatagcttcttaggagaatgacaaaaaa

SEQ ID NO: 3 - DNA, 29891 bp, SARS-CoV-2
gttctttaaggtttataccttcccaggtaacaaaccaaccaactttcgatctcttgtagatctgttctctaaacgaactttaaaatctgtgtggctgtcactcggctgcatgcttagtgcactcacgcagtataattaataactaattactgtcgttgacaggacacgagtaactcgtctatcttctgcaggctgcttacggtttcgtccgtgttgcagccgatcatcagcacatctaggtttcgtccgggtgtgaccgaaaggtaagatggagagccttgtccctggtttcaacgagaaaacacacgtccaactcagtttgcctgttttacaggttcgcgacgtgctcgtacgtggctttggagactccgtggaggaggtcttatcagaggcacgtcaacatcttaaagatggcacttgtggcttagtagaagttgaaaaaggcgttttgcctcaacttgaacagccctatgtgttcatcaaacgttcggatgctcgaactgcacctcatggtcatgttatggttgagctggtagcagaactcgaaggcattcagtacggtcgtagtggtgagacacttggtgtccttgtccctcatgtgggcgaaataccagtggcttaccgcaaggttcttcttcgtaagaacggtaataaaggagctggtggccatagttacggcgccgatctaaagtcatttgacttaggcgacgagcttggcactgatccttatgaagattttcaagaaaactggaacactaaacatagcagtggtgttacccgtgaactcatgcgtgagcttaacggaggggcatacactcgctatgtcgataacaacttctgtggccctgatggctaccctcttgagtgcattaaagaccttctagcacgtgctggtaaagcttcatgcactttgtccgaacaactggactttattgacactaagaggggtgtatactgctgccgtgaacatgagcatgaaattgcttggtacacggaacgttctgaaaagagctatgaattgcagacaccttttgaaattaaattggcaaagaaatttgacaccttcaatggggaatgtccaaattttgtatttcccttaaattccataatcaagactattcaaccaagggttgaaaagaaaaagcttgatggctttatgggtagaattcgatctgtctatccagttgcgtcaccaaatgaatgcaaccaaatgtgcctttcaactctcatgaagtgtgatcattgtggtgaaacttcatggcagacgggcgattttgttaaagccacttgcgaattttgtggcactgagaatttgactaaagaaggtgccactacttgtggttacttaccccaaaatgctgttgttaaaatttattgtccagcatgtcacaattcagaagtaggacctgagcatagtcttgccgaataccataatgaatctggcttgaaaaccattcttcgtaagggtggtcgcactattgcctttggaggctgtgtgttctcttatgttggttgccataacaagtgtgcctattgggttccacgtgctagcgctaacataggttgtaaccatacaggtgttgttggagaaggttccgaaggtcttaatgacaaccttcttgaaatactccaaaaagagaaagtcaacatcaatattgttggtgactttaaacttaatgaagagatcgccattattttggcatctttttctgcttccacaagtgcttttgtggaaactgtgaaaggtttggattataaagcattcaaacaaattgttgaatcctgtggtaattttaaagttacaaaaggaaaagctaaaaaaggtgcctggaatattggtgaacagaaatcaatactgagtcctctttatgcatttgcatcagaggctgctcgtgttgtacgatcaattttctcccgcactcttgaaactgctcaaaattctgtgcgtgttttacagaaggccgctataacaatactagatggaatttcacagtattcactgagactcattgatgctatgatgttcacatctgatttggctactaacaatctagttgtaatggcctacattacaggtggtgttgttcagttgacttcgcagtggctaactaacatctttggcactgtttatgaaaaactcaaacccgtccttgattggcttgaagagaagtttaaggaaggtgtagagtttcttagagacggttgggaaattgttaaatttatctcaacctgtgcttgtgaaattgtcggtggacaaattgtcacctgtgcaaaggaaattaaggagagtgttcagacattctttaagcttgtaaataaatttttggctttgtgtgctgactctatcattattggtggagctaaacttaaagccttgaatttaggtgaaacatttgtcacgcactcaaagggattgtacagaaagtgtgttaaatccagagaagaaactggcctactcatgcctctaaaagccccaaaagaaattatcttcttagagggagaaacacttcccacagaagtgttaacagaggaagttgtcttgaaaactggtgatttacaaccattagaacaacctactagtgaagctgttgaagctccattggttggtacaccagtttgtattaacgggcttatgttgctcgaaatcaaagacacagaaaagtactgtgcccttgcacctaatatgatggtaacaaacaataccttcacactcaaaggcggtgcaccaacaaaggttacttttggtgatgacactgtgatagaagtgcaaggttacaagagtgtgaatatcacttttgaacttgatgaaaggattgataaagtacttaatgagaagtgctctgcctatacagttgaactcggtacagaagtaaatgagttcgcctgtgttgtggcagatgctgtcataaaaactttgcaaccagtatctgaattacttacaccactgggcattgatttagatgagtggagtatggctacatactacttatttgatgagtctggtgagtttaaattggcttcacatatgtattgttctttctaccctccagatgaggatgaagaagaaggtgattgtgaagaagaagagtttgagccatcaactcaatatgagtatggtactgaagatgattaccaaggtaaacctttggaatttggtgccacttctgctgctcttcaacctgaagaagagcaagaagaagattggttagatgatgatagtcaacaaactgttggtcaacaagacggcagtgaggacaatcagacaactactattcaaacaattgttgaggttcaacctcaattagagatggaacttacaccagttgttcagactattgaagtgaatagttttagtggttatttaaaacttactgacaatgtatacattaaaaatgcagacattgtggaagaagctaaaaaggtaaaaccaacagtggttgttaatgcagccaatgtttaccttaaacatggaggaggtgttgcaggagccttaaataaggctactaacaatgccatgcaagttgaatctgatgattacatagctactaatggaccacttaaagtgggtggtagttgtgttttaagcggacacaatcttgctaaacactgtcttcatgttgtcggcccaaatgttaacaaaggtgaagacattcaacttcttaagagtgcttatgaaaattttaatcagcacgaagttctacttgcaccattattatcagctggtatttttggtgctgaccctatacattctttaagagtttgtgtagatactgttcgcacaaatgtctacttagctgtctttgataaaaatctctatgacaaacttgtttcaagctttttggaaatgaagagtgaaaagcaagttgaacaaaagatcgctgagattcctaaagaggaagttaagccatttataactgaaagtaaaccttcagttgaacagagaaaacaagatgataagaaaatcaaagcttgtgttgaagaagttacaacaactctggaagaaactaagttcctcacagaaaacttgttactttatattgacattaatggcaatcttcatccagattctgccactcttgttagtgacattgacatcactttcttaaagaaagatgctccatatatagtgggtgatgttgttcaagagggtgttttaactgctgtggttatacctactaaaaaggctggtggcactactgaaatgctagcgaaagctttgagaaaagtgccaacagacaattatataaccacttacccgggtcagggtttaaatggttacactgtagaggaggcaaagacagtgcttaaaaagtgtaaaagtgccttttacattctaccatctattatctctaatgagaagcaagaaattcttggaactgtttcttggaatttgcgagaaatgcttgcacatgcagaagaaacacgcaaattaatgcctgtctgtgtggaaactaaagccatagtttcaactatacagcgtaaatataagggtattaaaatacaagagggtgtggttgattatggtgctagattttacttttacaccagtaaaacaactgtagcgtcacttatcaacacacttaacgatctaaatgaaactcttgttacaatgccacttggctatgtaacacatggcttaaatttggaagaagctgctcggtatatgagatctctcaaagtgccagctacagtttctgtttcttcacctgatgctgttacagcgtataatggttatcttacttcttcttctaaaacacctgaagaacattttattgaaaccatctcacttgctggttcctataaagattggtcctattctggacaatctacacaactaggtatagaatttcttaagagaggtgataaaagtgtatattacactagtaatcctaccacattccacctagatggtgaagttatcacctttgacaatcttaagacacttctttctttgagagaagtgaggactattaaggtgtttacaacagtagacaacattaacctccacacgcaagttgtggacatgtcaatgacatatggacaacagtttggtccaacttatttggatggagctgatgttactaaaataaaacctcataattcacatgaaggtaaaacattttatgttttacctaatgatgacactctacgtgttgaggcttttgagtactaccacacaactgatcctagttttctgggtaggtacatgtcagcattaaatcacactaaaaagtggaaatacccacaagttaatggtttaacttctattaaatgggcagataacaactgttatcttgccactgcattgttaacactccaacaaatagagttgaagtttaatccacctgctctacaagatgcttattacagagcaagggctggtgaagctgctaacttttgtgcacttatcttagcctactgtaataagacagtaggtgagttaggtgatgttagagaaacaatgagttacttgtttcaacatgccaatttagattcttgcaaaagagtcttgaacgtggtgtgtaaaacttgtggacaacagcagacaacccttaagggtgtagaagctgttatgtacatgggcacactttcttatgaacaatttaagaaaggtgttcagataccttgtacgtgtggtaaacaagctacaaaatatctagtacaacaggagtcaccttttgttatgatgtcagcaccacctgctcagtatgaacttaagcatggtacatttacttgtgctagtgagtacactggtaattaccagtgtggtcactataaacatataacttctaaagaaactttgtattgcatagacggtgctttacttacaaagtcctcagaatacaaaggtcctattacggatgttttctacaaagaaaacagttacacaacaaccataaaaccagttacttataaattggatggtgttgtttgtacagaaattgaccctaagttggacaattattataagaaagacaattcttatttcacagagcaaccaattgatcttgtaccaaaccaaccatatccaaacgcaagcttcgataattttaagtttgtatgtgataatatcaaatttgctgatgatttaaaccagttaactggttataagaaacctgcttcaagagagcttaaagttacatttttccctgacttaaatggtgatgtggtggctattgattataaacactacacaccctcttttaagaaaggagctaaattgttacataaacctattgtttggcatgttaacaatgcaactaataaagccacgtataaaccaaatacctggtgtatacgttgtctttggagcacaaaaccagttgaaacatcaaattcgtttgatgtactgaagtcagaggacgcgcagggaatggataatcttgcctgcgaagatctaaaaccagtctctgaagaagtagtggaaaatcctaccatacagaaagacgttcttgagtgtaatgtgaaaactaccgaagttgtaggagacattatacttaaaccagcaaataatagtttaaaaattacagaagaggttggccacacagatctaatggctgcttatgtagacaattctagtcttactattaagaaacctaatgaattatctagagtattaggtttgaaaacccttgctactcatggtttagctgctgttaatagtgtcccttgggatactatagctaattatgctaagccttttcttaacaaagttgttagtacaactactaacatagttacacggtgtttaaaccgtgtttgtactaattatatgccttatttctttactttattgctacaattgtgtacttttactagaagtacaaattctagaattaaagcatctatgccgactactatagcaaagaatactgttaagagtgtcggtaaattttgtctagaggcttcatttaattatttgaagtcacctaatttttctaaactgataaatattataatttggtttttactattaagtgtttgcctaggttctttaatctactcaaccgctgctttaggtgttttaatgtctaatttaggcatgccttcttactgtactggttacagagaaggctatttgaactctactaatgtcactattgcaacctactgtactggttctataccttgtagtgtttgtcttagtggtttagattctttagacacctatccttctttagaaactatacaaattaccatttcatcttttaaatgggatttaactgcttttggcttagttgcagagtggtttttggcatatattcttttcactaggtttttctatgtacttggattggctgcaatcatgcaattgtttttcagctattttgcagtacattttattagtaattcttggcttatgtggttaataattaatcttgtacaaatggccccgatttcagctatggttagaatgtacatcttctttgcatcattttattatgtatggaaaagttatgtgcatgttgtagacggttgtaattcatcaacttgtatgatgtgttacaaacgtaatagagcaacaagagtcgaatgtacaactattgttaatggtgttagaaggtccttttatgtctatgctaatggaggtaaaggcttttgcaaactacacaattggaattgtgttaattgtgatacattctgtgctggtagtacatttattagtgatgaagttgcgagagacttgtcactacagtttaaaagaccaataaatcctactgaccagtcttcttacatcgttgatagtgttacagtgaagaatggttccatccatctttactttgataaagctggtcaaaagacttatgaaagacattctctctctcattttgttaacttagacaacctgagagctaataacactaaaggttcattgcctattaatgttatagtttttgatggtaaatcaaaatgtgaagaatcatctgcaaaatcagcgtctgtttactacagtcagcttatgtgtcaacctatactgttactagatcaggcattagtgtctgatgttggtgatagtgcggaagttgcagttaaaatgtttgatgcttacgttaatacgttttcatcaacttttaacgtaccaatggaaaaactcaaaacactagttgcaactgcagaagctgaacttgcaaagaatgtgtccttagacaatgtcttatctacttttatttcagcagctcggcaagggtttgttgattcagatgtagaaactaaagatgttgttgaatgtcttaaattgtcacatcaatctgacatagaagttactggcgatagttgtaataactatatgctcacctataacaaagttgaaaacatgacaccccgtgaccttggtgcttgtattgactgtagtgcgcgtcatattaatgcgcaggtagcaaaaagtcacaacattgctttgatatggaacgttaaagatttcatgtcattgtctgaacaactacgaaaacaaatacgtagtgctgctaaaaagaataacttaccttttaagttgacatgtgcaactactagacaagttgttaatgttgtaacaacaaagatagcacttaagggtggtaaaattgttaataattggttgaagcagttaattaaagttacacttgtgttcctttttgttgctgctattttctatttaataacacctgttcatgtcatgtctaaacatactgacttttcaagtgaaatcataggatacaaggctattgatggtggtgtcactcgtgacatagcatctacagatacttgttttgctaacaaacatgctgattttgacacatggtttagccagcgtggtggtagttatactaatgacaaagcttgcccattgattgctgcagtcataacaagagaagtgggttttgtcgtgcctggtttgcctggcacgatattacgcacaactaatggtgactttttgcatttcttacctagagtttttagtgcagttggtaacatctgttacacaccatcaaaacttatagagtacactgactttgcaacatcagcttgtgttttggctgctgaatgtacaatttttaaagatgcttctggtaagccagtaccatattgttatgataccaatgtactagaaggttctgttgcttatgaaagtttacgccctgacacacgttatgtgctcatggatggctctattattcaatttcctaacacctaccttgaaggttctgttagagtggtaacaacttttgattctgagtactgtaggcacggcacttgtgaaagatcagaagctggtgtttgtgtatctactagtggtagatgggtacttaacaatgattattacagatctttaccaggagttttctgtggtgtagatgctgtaaatttacttactaatatgtttacaccactaattcaacctattggtgctttggacatatcagcatctatagtagctggtggtattgtagctatcgtagtaacatgccttgcctactattttatgaggtttagaagagcttttggtgaatacagtcatgtagttgcctttaatactttactattccttatgtcattcactgtactctgtttaacaccagtttactcattcttacctggtgtttattctgttatttacttgtacttgacattttatcttactaatgatgtttcttttttagcacatattcagtggatggttatgttcacacctttagtacctttctggataacaattgcttatatcatttgtatttccacaaagcatttctattggttctttagtaattacctaaagagacgtgtagtctttaatggtgtttcctttagtacttttgaagaagctgcgctgtgcacctttttgttaaataaagaaatgtatctaaagttgcgtagtgatgtgctattacctcttacgcaatataatagatacttagctctttataataagtacaagtattttagtggagcaatggatacaactagctacagagaagctgcttgttgtcatctcgcaaaggctctcaatgacttcagtaactcaggttctgatgttctttaccaaccaccacaaacctctatcacctcagctgttttgcagagtggttttagaaaaatggcattcccatctggtaaagttgagggttgtatggtacaagtaacttgtggtacaactacacttaacggtctttggcttgatgacgtagtttactgtccaagacatgtgatctgcacctctgaagacatgcttaaccctaattatgaagatttactcattcgtaagtctaatcataatttcttggtacaggctggtaatgttcaactcagggttattggacattctatgcaaaattgtgtacttaagcttaaggttgatacagccaatcctaagacacctaagtataagtttgttcgcattcaaccaggacagactttttcagtgttagcttgttacaatggttcaccatctggtgtttaccaatgtgctatgaggcccaatttcactattaagggttcattccttaatggttcatgtggtagtgttggttttaacatagattatgactgtgtctctttttgttacatgcaccatatggaattaccaactggagttcatgctggcacagacttagaaggtaacttttatggaccttttgttgacaggcaaacagcacaagcagctggtacggacacaactattacagttaatgttttagcttggttgtacgctgctgttataaatggagacaggtggtttctcaatcgatttaccacaactcttaatgactttaaccttgtggctatgaagtacaattatgaacctctaacacaagaccatgttgacatactaggacctctttctgctcaaactggaattgccgttttagatatgtgtgcttcattaaaagaattactgcaaaatggtatgaatggacgtaccatattgggtagtgctttattagaagatgaatttacaccttttgatgttgttagacaatgctcaggtgttactttccaaagtgcagtgaaaagaacaatcaagggtacacaccactggttgttactcacaattttgacttcacttttagttttagtccagagtactcaatggtctttgttcttttttttgtatgaaaatgcctttttaccttttgctatgggtattattgctatgtctgcttttgcaatgatgtttgtcaaacataagcatgcatttctctgtttgtttttgttaccttctcttgccactgtagcttattttaatatggtctatatgcctgctagttgggtgatgcgtattatgacatggttggatatggttgatactagtttgtctggttttaagctaaaagactgtgttatgtatgcatcagctgtagtgttactaatccttatgacagcaagaactgtgtatgatgatggtgctaggagagtgtggacacttatgaatgtcttgacactcgtttataaagtttattatggtaatgctttagatcaagccatttccatgtgggctcttataatctctgttacttctaactactcaggtgtagttacaactgtcatgtttttggccagaggtattgtttttatgtgtgttgagtattgccctattttcttcataactggtaatacacttcagtgtataatgctagtttattgtttcttaggctatttttgtacttgttactttggcctcttttgtttactcaaccgctactttagactgactcttggtgtttatgattacttagtttctacacaggagtttagatatatgaattcacagggactactcccacccaagaatagcatagatgccttcaaactcaacattaaattgttgggtgttggtggcaaaccttgtatcaaagtagccactgtacagtctaaaatgtcagatgtaaagtgcacatcagtagtcttactctcagttttgcaacaactcagagtagaatcatcatctaaattgtgggctcaatgtgtccagttacacaatgacattctcttagctaaagatactactgaagcctttgaaaaaatggtttcactactttctgttttgctttccatgcagggtgctgtagacataaacaagctttgtgaagaaatgctggacaacagggcaaccttacaagctatagcctcagagtttagttcccttccatcatatgcagcttttgctactgctcaagaagcttatgagcaggctgttgctaatggtgattctgaagttgttcttaaaaagttgaagaagtctttgaatgtggctaaatctgaatttgaccgtgatgcagccatgcaacgtaagttggaaaagatggctgatcaagctatgacccaaatgtataaacaggctagatctgaggacaagagggcaaaagttactagtgctatgcagacaatgcttttcactatgcttagaaagttggataatgatgcactcaacaacattatcaacaatgcaagagatggttgtgttcccttgaacataatacctcttacaacagcagccaaactaatggttgtcataccagactataacacatataaaaatacgtgtgatggtacaacatttacttatgcatcagcattgtgggaaatccaacaggttgtagatgcagatagtaaaattgttcaacttagtgaaattagtatggacaattcacctaatttagcatggcctcttattgtaacagctttaagggccaattctgctgtcaaattacagaataatgagcttagtcctgttgcactacgacagatgtcttgtgctgccggtactacacaaactgcttgcactgatgacaatgcgttagcttactacaacacaacaaagggaggtaggtttgtacttgcactgttatccgatttacaggatttgaaatgggctagattccctaagagtgatggaactggtactatctatacagaactggaaccaccttgtaggtttgttacagacacacctaaaggtcctaaagtgaagtatttatactttattaaaggattaaacaacctaaatagaggtatggtacttggtagtttagctgccacagtacgtctacaagctggtaatgcaacagaagtgcctgccaattcaactgtattatctttctgtgcttttgctgtagatgctgctaaagcttacaaagattatctagctagtgggggacaaccaatcactaattgtgttaagatgttgtgtacacacactggtactggtcaggcaataacagttacaccggaagccaatatggatcaagaatcctttggtggtgcatcgtgttgtctgtactgccgttgccacatagatcatccaaatcctaaaggattttgtgacttaaaaggtaagtatgtacaaatacctacaacttgtgctaatgaccctgtgggttttacacttaaaaacacagtctgtaccgtctgcggtatgtggaaaggttatggctgtagttgtgatcaactccgcgaacccatgcttcagtcagctgatgcacaatcgtttttaaacgggtttgcggtgtaagtgcagcccgtcttacaccgtgcggcacaggcactagtactgatgtcgtatacagggcttttgacatctacaatgataaagtagctggttttgctaaattcctaaaaactaattgttgtcgcttccaagaaaaggacgaagatgacaatttaattgattcttactttgtagttaagagacacactttctctaactaccaacatgaagaaacaatttataatttacttaaggattgtccagctgttgctaaacatgacttctttaagtttagaatagacggtgacatggtaccacatatatcacgtcaacgtcttactaaatacacaatggcagacctcgtctatgctttaaggcattttgatgaaggtaattgtgacacattaaaagaaatacttgtcacatacaattgttgtgatgatgattatttcaataaaaaggactggtatgattttgtagaaaacccagatatattacgcgtatacgccaacttaggtgaacgtgtacgccaagctttgttaaaaacagtacaattctgtgatgccatgcgaaatgctggtattgttggtgtactgacattagataatcaagatctcaatggtaactggtatgatttcggtgatttcatacaaaccacgccaggtagtggagttcctgttgtagattcttattattcattgttaatgcctatattaaccttgaccagggctttaactgcagagtcacatgttgacactgacttaacaaagccttacattaagtgggatttgttaaaatatgacttcacggaagagaggttaaaactctttgaccgttattttaaatattgggatcagacataccacccaaattgtgttaactgtttggatgacagatgcattctgcattgtgcaaactttaatgttttattctctacagtgttcccacctacaagttttggaccactagtgagaaaaatatttgttgatggtgttccatttgtagtttcaactggataccacttcagagagctaggtgttgtacataatcaggatgtaaacttacatagctctagacttagttttaaggaattacttgtgtatgctgctgaccctgctatgcacgctgcttctggtaatctattactagataaacgcactacgtgcttttcagtagctgcacttactaacaatgttgcttttcaaactgtcaaacccggtaattttaacaaagacttctatgactttgctgtgtctaagggtttctttaaggaaggaagttctgttgaattaaaacacttcttctttgctcaggatggtaatgctgctatcagcgattatgactactatcgttataatctaccaacaatgtgtgatatcagacaactactatttgtagttgaagttgttgataagtactttgattgttacgatggtggctgtattaatgctaaccaagtcatcgtcaacaacctagacaaatcagctggttttccatttaataaatggggtaaggctagactttattatgattcaatgagttatgaggatcaagatgcacttttcgcatatacaaaacgtaatgtcatccctactataactcaaatgaatcttaagtatgccattagtgcaaagaatagagctcgcaccgtagctggtgtctctatctgtagtactatgaccaatagacagtttcatcaaaaattattgaaatcaatagccgccactagaggagctactgtagtaattggaacaagcaaattctatggtggttggcacaacatgttaaaaactgtttatagtgatgtagaaaaccctcaccttatgggttgggattatcctaaatgtgatagagccatgcctaatatgcttagaattatggcctcacttgttcttgctcgcaaacatacaacgtgttgtagcttgtcacaccgtttctatagattagctaatgagtgtgctcaagtattgagtgaaatggtcatgtgtggcggttcactatatgttaaaccaggtggaacctcatcaggagatgccacaactgcttatgctaatagtgtttttaacatttgtcaagctgtcacggccaatgttaatgcacttttatctactgatggtaacaaaattgccgataagtatgtccgcaatttacaacacagactttatgagtgtctctatagaaatagagatgttgacacagactttgtgaatgagttttacgcatatttgcgtaaacatttctcaatgatgatactctctgacgatgctgttgtgtgtttcaatagcacttatgcatctcaaggtctagtggctagcataaagaactttaagtcagttctttattatcaaaacaatgtttttatgtctgaagcaaaatgttggactgagactgaccttactaaaggacctcatgaattttgctctcaacatacaatgctagttaaacagggtgatgattatgtgtaccttccttacccagatccatcaagaatcctaggggccggctgttttgtagatgatatcgtaaaaacagatggtacacttatgattgaacggttcgtgtctttagctatagatgcttacccacttactaaacatcctaatcaggagtatgctgatgtctttcatttgtacttacaatacataagaaagctacatgatgagttaacaggacacatgttagacatgtattctgttatgcttactaatgataacacttcaaggtattgggaacctgagttttatgaggctatgtacacaccgcatacagtcttacaggctgttggggcttgtgttctttgcaattcacagacttcattaagatgtggtgcttgcatacgtagaccattcttatgttgtaaatgctgttacgaccatgtcatatcaacatcacataaattagtcttgtctgttaatccgtatgtttgcaatgctccaggttgtgatgtcacagatgtgactcaactttacttaggaggtatgagctattattgtaaatcacataaaccacccattagttttccattgtgtgctaatggacaagtttttggtttatataaaaatacatgtgttggtagcgataatgttactgactttaatgcaattgcaacatgtgactggacaaatgctggtgattacattttagctaacacctgtactgaaagactcaagctttttgcagcagaaacgctcaaagctactgaggagacatttaaactgtcttatggtattgctactgtacgtgaagtgctgtctgacagagaattacatctttcatgggaagttggtaaacctagaccaccacttaaccgaaattatgtctttactggttatcgtgtaactaaaaacagtaaagtacaaataggagagtacacctttgaaaaaggtgactatggtgatgctgttgtttaccgaggtacaacaacttacaaattaaatgttggtgattattttgtgctgacatcacatacagtaatgccattaagtgcacctacactagtgccacaagagcactatgttagaattactggcttatacccaacactcaatatctcagatgagttttctagcaatgttgcaaattatcaaaaggttggtatgcaaaagtattctacactccagggaccacctggtactggtaagagtcattttgctattggcctagctctctactacccttctgctcgcatagtgtatacagcttgctctcatgccgctgttgatgcactatgtgagaaggcattaaaatatttgcctatagataaatgtagtagaattatacctgcacgtgctcgtgtagagtgttttgataaattcaaagtgaattcaacattagaacagtatgtcttttgtactgtaaatgcattgcctgagacgacagcagatatagttgtctttgatgaaatttcaatggccacaaattatgatttgagtgttgtcaatgccagattacgtgctaagcactatgtgtacattggcgaccctgctcaattacctgcaccacgcacattgctaactaagggcacactagaaccagaatatttcaattcagtgtgtagacttatgaaaactataggtccagacatgttcctcggaacttgtcggcgttgtcctgctgaaattgttgacactgtgagtgctttggtttatgataataagcttaaagcacataaagacaaatcagctcaatgctttaaaatgttttataagggtgttatcacgcatgatgtttcatctgcaattaacaggccacaaataggcgtggtaagagaattccttacacgtaaccctgcttggagaaaagctgtctttatttcaccttataattcacagaatgctgtagcctcaaagattttgggactaccaactcaaactgttgattcatcacagggctcagaatatgactatgtcatattcactcaaaccactgaaacagctcactcttgtaatgtaaacagatttaatgttgctattaccagagcaaaagtaggcatactttgcataatgtctgatagagacctttatgacaagttgcaatttacaagtcttgaaattccacgtaggaatgtggcaactttacaagctgaaaatgtaacaggactctttaaagattgtagtaaggtaatcactgggttacatcctacacaggcacctacacacctcagtgttgacactaaattcaaaactgaaggtttatgtgttgacatacctggcatacctaaggacatgacctatagaagactcatctctatgatgggttttaaaatgaattatcaagttaatggttaccctaacatgtttatcacccgcgaagaagctataagacatgtacgtgcatggattggcttcgatgtcgaggggtgtcatgctactagagaagctgttggtaccaatttacctttacagctaggtttttctacaggtgttaacctagttgctgtacctacaggttatgttgatacacctaataatacagatttttccagagttagtgctaaaccaccgcctggagatcaatttaaacacctcataccacttatgtacaaaggacttccttggaatgtagtgcgtataaagattgtacaaatgttaagtgacacacttaaaaatctctctgacagagtcgtatttgtcttatgggcacatggctttgagttgacatctatgaagtattttgtgaaaataggacctgagcgcacctgttgtctatgtgatagacgtgccacatgcttttccactgcttcagacacttatgcctgttggcatcattctattggatttgattacgtctataatccgtttatgattgatgttcaacaatggggttttacaggtaacctacaaagcaaccatgatctgtattgtcaagtccatggtaatgcacatgtagctagttgtgatgcaatcatgactaggtgtctagctgtccacgagtgctttgttaagcgtgttgactggactattgaatatcctataattggtgatgaactgaagattaatgcggcttgtagaaaggttcaacacatggttgttaaagctgcattattagcagacaaattcccagttcttcacgacattggtaaccctaaagctattaagtgtgtacctcaagctgatgtagaatggaagttctatgatgcacagccttgtagtgacaaagcttataaaatagaagaattattctattcttatgccacacattctgacaaattcacagatggtgtatgcctattttggaattgcaatgtcgatagatatcctgctaattccattgtttgtagatttgacactagagtgctatctaaccttaacttgcctggttgtgatggtggcagtttgtatgtaaataaacatgcattccacacaccagcttttgataaaagtgcttttgttaatttaaaacaattaccatttttctattactctgacagtccatgtgagtctcatggaaaacaagtagtgtcagatatagattatgtaccactaaagtctgctacgtgtataacacgttgcaatttaggtggtgctgtctgtagacatcatgctaatgagtacagattgtatctcgatgcttataacatgatgatctcagctggctttagcttgtgggtttacaaacaatttgatacttataacctctggaacacttttacaagacttcagagtttagaaaatgtggcttttaatgttgtaaataagggacactttgatggacaacagggtgaagtaccagtttctatcattaataacactgtttacacaaaagttgatggtgttgatgtagaattgtttgaaaataaaacaacattacctgttaatgtagcatttgagctttgggctaagcgcaacattaaaccagtaccagaggtgaaaatactcaataatttgggtgtggacattgctgctaatactgtgatctgggactacaaaagagatgctccagcacatatatctactattggtgtttgttctatgactgacatagccaagaaaccaactgaaacgatttgtgcaccactcactgtcttttttgatggtagagttgatggtcaagtagacttatttagaaatgcccgtaatggtgttcttattacagaaggtagtgttaaaggtttacaaccatctgtaggtcccaaacaagctagtcttaatggagtcacattaattggagaagccgtaaaaacacagttcaattattataagaaagttgatggtgttgtccaacaattacctgaaacttactttactcagagtagaaatttacaagaatttaaacccaggagtcaaatggaaattgatttcttagaattagctatggatgaattcattgaacggtataaattagaaggctatgccttcgaacatatcgtttatggagattttagtcatagtcagttaggtggtttacatctactgattggactagctaaacgttttaaggaatcaccttttgaattagaagattttattcctatggacagtacagttaaaaactatttcataacagatgcgcaaacaggttcatctaagtgtgtgtgttctgttattgatttattacttgatgattttgttgaaataataaaatcccaagatttatctgtagtttctaaggttgtcaaagtgactattgactatacagaaatttcatttatgctttggtgtaaagatggccatgtagaaacattttacccaaaattacaatctagtcaagcgtggcaaccgggtgttgctatgcctaatctttacaaaatgcaaagaatgctattagaaaagtgtgaccttcaaaattatggtgatagtgcaacattacctaaaggcataatgatgaatgtcgcaaaatatactcaactgtgtcaatatttaaacacattaacattagctgtaccctataatatgagagttatacattttggtgctggttctgataaaggagttgcaccaggtacagctgttttaagacagtggttgcctacgggtacgctgcttgtcgattcagatcttaatgactttgtctctgatgcagattcaactttgattggtgattgtgcaactgtacatacagctaataaatgggatctcattattagtgatatgtacgaccctaagactaaaaatgttacaaaagaaaatgactctaaagagggttttttcacttacatttgtgggtttatacaacaaaagctagctcttggaggttccgtggctataaagataacagaacattcttggaatgctgatctttataagctcatgggacacttcgcatggtggacagcctttgttactaatgtgaatgcgtcatcatctgaagcatttttaattggatgtaattatcttggcaaaccacgcgaacaaatagatggttatgtcatgcatgcaaattacatattttggaggaatacaaatccaattcagttgtcttcctattctttatttgacatgagtaaatttccccttaaattaaggggtactgctgttatgtctttaaaagaaggtcaaatcaatgatatgattttatctcttcttagtaaaggtagacttataattagagaaaacaacagagttgttatttctagtgatgttcttgttaacaactaaacgaacaatgtttgtttttcttgttttattgccactagtctctagtcagtgtgttaatcttacaaccagaactcaattaccccctgcatacactaattctttcacacgtggtgtttattaccctgacaaagttttcagatcctcagttttacattcaactcaggacttgttcttacctttcttttccaatgttacttggttccatgctatacatgtctctgggaccaatggtactaagaggtttgataaccctgtcctaccatttaatgatggtgtttattttgcttccactgagaagtctaacataataagaggctggatttttggtactactttagattcgaagacccagtccctacttattgttaataacgctactaatgttgttattaaagtctgtgaatttcaattttgtaatgatccatttttgggtgtttattaccacaaaaacaacaaaagttggatggaaagtgagttcagagtttattctagtgcgaataattgcacttttgaatatgtctctcagccttttcttatggaccttgaaggaaaacagggtaatttcaaaaatcttagggaatttgtgtttaagaatattgatggttattttaaaatatattctaagcacacgcctattaatttagtgcgtgatctccctcagggtttttcggctttagaaccattggtagatttgccaataggtattaacatcactaggtttcaaactttacttgctttacatagaagttatttgactcctggtgattcttcttcaggttggacagctggtgctgcagcttattatgtgggttatcttcaacctaggacttttctattaaaatataatgaaaatggaaccattacagatgctgtagactgtgcacttgaccctctctcagaaacaaagtgtacgttgaaatccttcactgtagaaaaaggaatctatcaaacttctaactttagagtccaaccaacagaatctattgttagatttcctaatattacaaacttgtgcccttttggtgaagtttttaacgccaccagatttgcatctgtttatgcttggaacaggaagagaatcagcaactgtgttgctgattattctgtcctatataattccgcatcattttccacttttaagtgttatggagtgtctcctactaaattaaatgatctctgctttactaatgtctatgcagattcatttgtaattagaggtgatgaagtcagacaaatcgctccagggcaaactggaaagattgctgattataattataaattaccagatgattttacaggctgcgttatagcttggaattctaacaatcttgattctaaggttggtggtaattataattacctgtatagattgtttaggaagtctaatctcaaaccttttgagagagatatttcaactgaaatctatcaggccggtagcacaccttgtaatggtgttgaaggttttaattgttactttcctttacaatcatatggtttccaacccactaatggtgttggttaccaaccatacagagtagtagtactttcttttgaacttctacatgcaccagcaactgtttgtggacctaaaaagtctactaatttggttaaaaacaaatgtgtcaatttcaacttcaatggtttaacaggcacaggtgttcttactgagtctaacaaaaagtttctgcctttccaacaatttggcagagacattgctgacactactgatgctgtccgtgatccacagacacttgagattcttgacattacaccatgttcttttggtggtgtcagtgttataacaccaggaacaaatacttctaaccaggttgctgttctttatcaggatgttaactgcacagaagtccctgttgctattcatgcagatcaacttactcctacttggcgtgtttattctacaggttctaatgtttttcaaacacgtgcaggctgtttaataggggctgaacatgtcaacaactcatatgagtgtgacatacccattggtgcaggtatatgcgctagttatcagactcagactaattctcctcggcgggcacgtagtgtagctagtcaatccatcattgcctacactatgtcacttggtgcagaaaattcagttgcttactctaataactctattgccatacccacaaattttactattagtgttaccacagaaattctaccagtgtctatgaccaagacatcagtagattgtacaatgtacatttgtggtgattcaactgaatgcagcaatcttttgttgcaatatggcagtttttgtacacaattaaaccgtgctttaactggaatagctgttgaacaagacaaaaacacccaagaagtttttgcacaagtcaaacaaatttacaaaacaccaccaattaaagattttggtggttttaatttttcacaaatattaccagatccatcaaaaccaagcaagaggtcatttattgaagatctacttttcaacaaagtgacacttgcagatgctggcttcatcaaacaatatggtgattgccttggtgatattgctgctagagacctcatttgtgcacaaaagtttaacggccttactgttttgccacctttgctcacagatgaaatgattgctcaatacacttctgcactgttagcgggtacaatcacttctggttggacctttggtgcaggtgctgcattacaaataccatttgctatgcaaatggcttataggtttaatggtattggagttacacagaatgttctctatgagaaccaaaaattgattgccaaccaatttaatagtgctattggcaaaattcaagactcactttcttccacagcaagtgcacttggaaaacttcaagatgtggtcaaccaaaatgcacaagctttaaacacgcttgttaaacaacttagctccaattttggtgcaatttcaagtgttttaaatgatatcctttcacgtcttgacaaagttgaggctgaagtgcaaattgataggttgatcacaggcagacttcaaagtttgcagacatatgtgactcaacaattaattagagctgcagaaatcagagcttctgctaatcttgctgctactaaaatgtcagagtgtgtacttggacaatcaaaaagagttgatttttgtggaaagggctatcatcttatgtccttccctcagtcagcacctcatggtgtagtcttcttgcatgtgacttatgtccctgcacaagaaaagaacttcacaactgctcctgccatttgtcatgatggaaaagcacactttcctcgtgaaggtgtctttgtttcaaatggcacacactggtttgtaacacaaaggaatttttatgaaccacaaatcattactacagacaacacatttgtgtctggtaactgtgatgttgtaataggaattgtcaacaacacagtttatgatcctttgcaacctgaattagactcattcaaggaggagttagataaatattttaagaatcatacatcaccagatgttgatttaggtgacatctctggcattaatgcttcagttgtaaacattcaaaaagaaattgaccgcctcaatgaggttgccaagaatttaaatgaatctctcatcgatctccaagaacttggaaagtatgagcagtatataaaatggccatggtacatttggctaggttttatagctggcttgattgccatagtaatggtgacaattatgctttgctgtatgaccagttgctgtagttgtctcaagggctgttgttcttgtggatcctgctgcaaatttgatgaagacgactctgagccagtgctcaaaggagtcaaattacattacacataaacgaacttatggatttgtttatgagaatcttcacaattggaactgtaactttgaagcaaggtgaaatcaaggatgctactccttcagattttgttcgcgctactgcaacgataccgatacaagcctcactccctttcggatggcttattgttggcgttgcacttcttgctgtttttcagagcgcttccaaaatcataaccctcaaaaagagatggcaactagcactctccaagggtgttcactttgtttgcaacttgctgttgttgtttgtaacagtttactcacaccttttgctcgttgctgctggccttgaagccccttttctctatctttatgctttagtctacttcttgcagagtataaactttgtaagaataataatgaggctttggctttgctggaaatgccgttccaaaaacccattactttatgatgccaactattttctttgctggcatactaattgttacgactattgtataccttacaatagtgtaacttcttcaattgtcattacttcaggtgatggcacaacaagtcctatttctgaacatgactaccagattggtggttatactgaaaaatgggaatctggagtaaaagactgtgttgtattacacagttacttcacttcagactattaccagctgtactcaactcaattgagtacagacactggtgttgaacatgttaccttcttcatctacaataaaattgttgatgagcctgaagaacatgtccaaattcacacaatcgacggttcatccggagttgttaatccagtaatggaaccaatttatgatgaaccgacgacgactactagcgtgcctttgtaagcacaagctgatgagtacgaacttatgtactcattcgtttcggaagagacaggtacgttaatagttaatagcgtacttctttttcttgctttcgtggtattcttgctagttacactagccatccttactgcgcttcgattgtgtgcgtactgctgcaatattgttaacgtgagtcttgtaaaaccttctttttacgtttactctcgtgttaaaaatctgaattcttctagagttcctgatcttctggtctaaacgaactaaatattatattagtttttctgtttggaactttaattttagccatggcagattccaacggtactattaccgttgaagagcttaaaaagctccttgaacaatggaacctagtaataggtttcctattccttacatggatttgtcttctacaatttgcctatgccaacaggaataggtttttgtatataattaagttaattttcctctggctgttatggccagtaactttagcttgttttgtgcttgctgctgtttacagaataaattggatcaccggtggaattgctatcgcaatggcttgtcttgtaggcttgatgtggctcagctacttcattgcttctttcagactgtttgcgcgtacgcgttccatgtggtcattcaatccagaaactaacattcttctcaacgtgccactccatggcactattctgaccagaccgcttctagaaagtgaactcgtaatcggagctgtgatccttcgtggacatcttcgtattgctggacaccatctaggacgctgtgacatcaaggacctgcctaaagaaatcactgttgctacatcacgaacgctttcttattacaaattgggagcttcgcagcgtgtagcaggtgactcaggttttgctgcatacagtcgctacaggattggcaactataaattaaacacagaccattccagtagcagtgacaatattgctttgcttgtacagtaagtgacaacagatgtttcatctcgttgactttcaggttactatagcagagatattactaattattatgaggacttttaaagtttccatttggaatcttgattacatcataaacctcataattaaaaatttatctaagtcactaactgagaataaatattctcaattagatgaagagcaaccaatggagattgattaaacgaacatgaaaattattcttttcttggcactgataacactcgctacttgtgagctttatcactaccaagagtgtgttagaggtacaacagtacttttaaaagaaccttgctcttctggaacatacgagggcaattcaccatttcatcctctagctgataacaaatttgcactgacttgctttagcactcaatttgcttttgcttgtcctgacggcgtaaaacacgtctatcagttacgtgccagatcagtttcacctaaactgttcatcagacaagaggaagttcaagaactttactctccaatttttcttattgttgcggcaatagtgtttataacactttgcttcacactcaaaagaaagacagaatgattgaactttcattaattgacttctatttgtgctttttagcctttctgctattccttgttttaattatgcttattatcttttggttctcacttgaactgcaagatcataatgaaacttgtcacgcctaaacgaacatgaaatttcttgttttcttaggaatcatcacaactgtagctgcatttcaccaagaatgtagtttacagtcatgtactcaacatcaaccatatgtagttgatgacccgtgtcctattcacttctattctaaatggtatattagagtaggagctagaaaatcagcacctttaattgaattgtgcgtggatgaggctggttctaaatcacccattcagtacatcgatatcggtaattatacagtttcctgtttaccttttacaattaattgccaggaacctaaattgggtagtcttgtagtgcgttgttcgttctatgaagactttttagagtatcatgacgttcgtgttgttttagatttcatctaaacgaacaaactaaaatgtctgataatggaccccaaaatcagcgaaatgcaccccgcattacgtttggtggaccctcagattcaactggcagtaaccagaatggagaacgcagtggggcgcgatcaaaacaacgtcggccccaaggtttacccaataatactgcgtcttggttcaccgctctcactcaacatggcaaggaagaccttaaattccctcgaggacaaggcgttccaattaacaccaatagcagtccagatgaccaaattggctactaccgaagagctaccagacgaattcgtggtggtgacggtaaaatgaaagatctcagtccaagatggtatttctactacctaggaactgggccagaagctggacttccctatggtgctaacaaagacggcatcatatgggttgcaactgagggagccttgaatacaccaaaagatcacattggcacccgcaatcctgctaacaatgctgcaatcgtgctacaacttcctcaaggaacaacattgccaaaaggcttctacgcagaagggagcagaggcggcagtcaagcctcttctcgttcctcatcacgtagtcgcaacagttcaagaaattcaactccaggcagcagtaggggaacttctcctgctagaatggctggcaatggcggtgatgctgctcttgctttgctgctgcttgacagattgaaccagcttgagagcaaaatgtctggtaaaggccaacaacaacaaggccaaactgtcactaagaaatctgctgctgaggcttctaagaagcctcggcaaaaacgtactgccactaaagcatacaatgtaacacaagctttcggcagacgtggtccagaacaaacccaaggaaattttggggaccaggaactaatcagacaaggaactgattacaaacattggccgcaaattgcacaatttgcccccagcgcttcagcgttcttcggaatgtcgcgcattggcatggaagtcacaccttcgggaacgtggttgacctacacaggtgccatcaaattggatgacaaagattcaaatttcaaagatcaagtcattttgctgaataagcatattgacgcatacaaaacattcccaccaacagagcctaaaaaggacaaaaagaagaaggctgatgaaactcaagccttaccgcagagacagaagaaacagcaaactgtgactcttcttcctgctgcagatttggatgatttctccaaacaattgcaacaatccatgagcagtgctgactcaactcaggcctaaactcatgcagaccacacaaggcagatgggctatataaacgttttcgcttttccgtttacgatatatagtctactcttgtgcagaatgaattctcgtaactacatagcacaagtagatgtagttaactttaatctcacatagcaatctttaatcagtgtgtaacattagggaggacttgaaagagccaccacattttcaccgaggccacgcggagtacgatcgagtgtacagtgaacaatgctagggagagctgcctatatggaagagccctaatgtgtaaaattaattttagtagtgctatccccatgtgattttaatagcttcttaggagaatgacaaaaaaaaaaaaaggaga

SEQ ID NO: 4 - DNA, 29886 bp, SARS-CoV-2
attaaaggtttataccttcccaggtaacaaaccaaccaactttcgatctcttgtagatctgttctctaaacgaactttaaaatctgtgtggctgtcactcggctgcatgcttagtgcactcacgcagtataattaataactaattactgtcgttgacaggacacgagtaactcgtctatcttctgcaggctgcttacggtttcgtccgtgttgcagccgatcatcagcacatctaggtttcgtccgggtgtgaccgaaaggtaagatggagagccttgtccctggtttcaacgagaaaacacacgtccaactcagtttgcctgttttacaggttcgcgacgtgctcgtacgtggctttggagactccgtggaggaggtcttatcagaggcacgtcaacatcttaaagatggcacttgtggcttagtagaagttgaaaaaggcgttttgcctcaacttgaacagccctatgtgttcatcaaacgttcggatgctcgaactgcacctcatggtcatgttatggttgagctggtagcagaactcgaaggcattcagtacggtcgtagtggtgagacacttggtgtccttgtccctcatgtgggcgaaataccagtggcttaccgcaaggttcttcttcgtaagaacggtaataaaggagctggtggccatagttacggcgccgatctaaagtcatttgacttaggcgacgagcttggcactgatccttatgaagattttcaagaaaactggaacactaaacatagcagtggtgttacccgtgaactcatgcgtgagcttaacggaggggcatacactcgctatgtcgataacaacttctgtggccctgatggctaccctcttgagtgcattaaagaccttctagcacgtgctggtaaagcttcatgcactttgtccgaacaactggactttattgacactaagaggggtgtatactgctgccgtgaacatgagcatgaaattgcttggtacacggaacgttctgaaaagagctatgaattgcagacaccttttgaaattaaattggcaaagaaatttgacaccttcaatggggaatgtccaaattttgtatttcccttaaattccataatcaagactattcaaccaagggttgaaaagaaaaagcttgatggctttatgggtagaattcgatctgtctatccagttgcgtcaccaaatgaatgcaaccaaatgtgcctttcaactctcatgaagtgtgatcattgtggtgaaacttcatggcagacgggcgattttgttaaagccacttgcgaattttgtggcactgagaatttgactaaagaaggtgccactacttgtggttacttaccccaaaatgctgttgttaaaatttattgtccagcatgtcacaattcagaagtaggacctgagcatagtcttgccgaataccataatgaatctggcttgaaaaccattcttcgtaagggtggtcgcactattgcctttggaggctgtgtgttctcttatgttggttgccataacaagtgtgcctattgggttccacgtgctagcgctaacataggttgtaaccatacaggtgttgttggagaaggttccgaaggtcttaatgacaaccttcttgaaatactccaaaaagagaaagtcaacatcaatattgttggtgactttaaacttaatgaagagatcgccattattttggcatctttttctgcttccacaagtgcttttgtggaaactgtgaaaggtttggattataaagcattcaaacaaattgttgaatcctgtggtaattttaaagttacaaaaggaaaagctaaaaaaggtgcctggaatattggtgaacagaaatcaatactgagtcctctttatgcatttgcatcagaggctgctcgtgttgtacgatcaattttctcccgcactcttgaaactgctcaaaattctgtgcgtgttttacagaaggccgctataacaatactagatggaatttcacagtattcactgagactcattgatgctatgatgttcacatctgatttggctactaacaatctagttgtaatggcctacattacaggtggtgttgttcagttgacttcgcagtggctaactaacatctttggcactgtttatgaaaaactcaaacccgtccttgattggcttgaagagaagtttaaggaaggtgtagagtttcttagagacggttgggaaattgttaaatttatctcaacctgtgcttgtgaaattgtcggtggacaaattgtcacctgtgcaaaggaaattaaggagagtgttcagacattctttaagcttgtaaataaatttttggctttgtgtgctgactctatcattattggtggagctaaacttaaagccttgaatttaggtgaaacatttgtcacgcactcaaagggattgtacagaaagtgtgttaaatccagagaagaaactggcctactcatgcctctaaaagccccaaaagaaattatcttcttagagggagaaacacttcccacagaagtgttaacagaggaagttgtcttgaaaactggtgatttacaaccattagaacaacctactagtgaagctgttgaagctccattggttggtacaccagtttgtattaacgggcttatgttgctcgaaatcaaagacacagaaaagtactgtgcccttgcacctaatatgatggtaacaaacaataccttcacactcaaaggcagtgcaccaacaaaggttacttttggtgatgacactgtgatagaagtgcaaggttacaagagtgtgaatatcacttttgaacttgatgaaaggattgataaagtacttaatgagaagtgctctgcctatacagttgaactcggtacagaagtaaatgagttcgcctgtgttgtggcagatgctgtcataaaaactttgcaaccagtatctgaattacttacaccactgggcattgatttagatgagtggagtatggctacatactacttatttgatgagtctggtgagtttaaattggcttcacatatgtattgttctttctaccctccagatgaggatgaagaagaaggtgattgtgaagaagaagagtttgagccatcaactcaatatgagtatggtactgaagatgattaccaaggtaaacctttggaatttggtgccacttctgctgctcttcaacctgaagaagagcaagaagaagattggttagatgatgatagtcaacaaactgttggtcaacaagacggcagtgaggacaatcagacaactactattcaaacaattgttgaggttcaacctcaattagagatggaacttacaccagttgttcagactattgaagtgaatagttttagtggttatttaaaacttactgacaatgtatacattaaaaatgcagacattgtggaagaagctaaaaaggtaaaaccaacagtggttgttaatgcagccaatgtttaccttaaacatggaggaggtgttgcaggagccttaaataaggctactaacaatgccatgcaagttgaatctgatgattacatagctactaatggaccacttaaagtgggtggtagttgtgttttaagcggacacaatcttgctaaacactgtcttcatgttgtcggcccaaatgttaacaaaggtgaagacattcaacttcttaagagtgcttatgaaaattttaatcagcacgaagttctacttgcaccattattatcagctggtatttttggtgctgaccctatacattctttaagagtttgtgtagatactgttcgcacaaatgtctacttagctgtctttgataaaaatctctatgacaaacttgtttcaagctttttggaaatgaagagtgaaaagcaagttgaacaaaagatcgctgagattcctaaagaggaagttaagccatttataactgaaagtaaaccttcagttgaacagagaaaacaagatgataagaaaatcaaagcttgtgttgaagaagttacaacaactctggaagaaactaagttcctcacagaaaacttgttactttatattgacattaatggcaatcttcatccagattctgccactcttgttagtgacattgacatcactttcttaaagaaagatgctccatatatagtgggtgatgttgttcaagagggtgttttaactgctgtggttatacctactaaaaaggctggtggcactactgaaatgctagcgaaagctttgagaaaagtgccaacagacaattatataaccacttacccgggtcagggtttaaatggttacactgtagaggaggcaaagacagtgcttaaaaagtgtaaaagtgccttttacattctaccatctattatctctaatgagaagcaagaaattcttggaactgtttcttggaatttgcgagaaatgcttgcacatgcagaagaaacacgcaaattaatgcctgtctgtgtggaaactaaagccatagtttcaactatacagcgtaaatataagggtattaaaatacaagagggtgtggttgattatggtgctagattttacttttacaccagtaaaacaactgtagcgtcacttatcaacacacttaacgatctaaatgaaactcttgttacaatgccacttggctatgtaacacatggcttaaatttggaagaagctgctcggtatatgagatctctcaaagtgccagctacagtttctgtttcttcacctgatgctgttacagcgtataatggttatcttacttcttcttctaaaacacctgaagaacattttattgaaaccatctcacttgctggttcctataaagattggtcctattctggacaatctacacaactaggtatagaatttcttaagagaggtgataaaagtgtatattacactagtaatcctaccacattccacctagatggtgaagttatcacctttgacaatcttaagacacttctttctttgagagaagtgaggactattaaggtgtttacaacagtagacaacattaacctccacacgcaagttgtggacatgtcaatgacatatggacaacagtttggtccaacttatttggatggagctgatgttactaaaataaaacctcataattcacatgaaggtaaaacattttatgttttacctaatgatgacactctacgtgttgaggcttttgagtactaccacacaactgatcctagttttctgggtaggtacatgtcagcattaaatcacactaaaaagtggaaatacccacaagttaatggtttaacttctattaaatgggcagataacaactgttatcttgccactgcattgttaacactccaacaaatagagttgaagtttaatccacctgctctacaagatgcttattacagagcaagggctggtgaagctgctaacttttgtgcacttatcttagcctactgtaataagacagtaggtgagttaggtgatgttagagaaacaatgagttacttgtttcaacatgccaatttagattcttgcaaaagagtcttgaacgtggtgtgtaaaacttgtggacaacagcagacaacccttaagggtgtagaagctgttatgtacatgggcacactttcttatgaacaatttaagaaaggtgttcagataccttgtacgtgtggtaaacaagctacaaaatatctagtacaacaggagtcaccttttgttatgatgtcagcaccacctgctcagtatgaacttaagcatggtacatttacttgtgctagtgagtacactggtaattaccagtgtggtcactataaacatataacttctaaagaaactttgtattgcatagacggtgctttacttacaaagtcctcagaatacaaaggtcctattacggatgttttctacaaagaaaacagttacacaacaaccataaaaccagttacttataaattggatggtgttgtttgtacagaaattgaccctaagttggacaattattataagaaagacaattcttatttcacagagcaaccaattgatcttgtaccaaaccaaccatatccaaacgcaagcttcgataattttaagtttgtatgtgataatatcaaatttgctgatgatttaaaccagttaactggttataagaaacctgcttcaagagagcttaaagttacatttttccctgacttaaatggtgatgtggtggctattgattataaacactacacaccctcttttaagaaaggagctaaattgttacataaacctattgtttggcatgttaacaatgcaactaataaagccacgtataaaccaaatacctggtgtatacgttgtctttggagcacaaaaccagttgaaacatcaaattcgtttgatgtactgaagtcagaggacgcgcagggaatggataatcttgcctgcgaagatctaaaaccagtctctgaagaagtagtggaaaatcctaccatacagaaagacgttcttgagtgtaatgtgaaaactaccgaagttgtaggagacattatacttaaaccagcaaataatagtttaaaaattacagaagaggttggccacacagatctaatggctgcttatgtagacaattctagtcttactattaagaaacctaatgaattatctagagtattaggtttgaaaacccttgctactcatggtttagctgctgttaatagtgtcccttgggatactatagctaattatgctaagccttttcttaacaaagttgttagtacaactactaacatagttacacggtgtttaaaccgtgtttgtactaattatatgccttatttctttactttattgctacaattgtgtacttttactagaagtacaaattctagaattaaagcatctatgccgactactatagcaaagaatactgttaagagtgtcggtaaattttgtctagaggcttcatttaattatttgaagtcacctaatttttctaaactgataaatattataatttggtttttactattaagtgtttgcctaggttctttaatctactcaaccgctgctttaggtgttttaatgtctaatttaggcatgccttcttactgtactggttacagagaaggctatttgaactctactaatgtcactattgcaacctactgtactggttctataccttgtagtgtttgtcttagtggtttagattctttagacacctatccttctttagaaactatacaaattaccatttcatcttttaaatgggatttaactgcttttggcttagttgcagagtggtttttggcatatattcttttcactaggtttttctatgtacttggattggctgcaatcatgcaattgtttttcagctattttgcagtacattttattagtaattcttggcttatgtggttaataattaatcttgtacaaatggccccgatttcagctatggttagaatgtacatcttctttgcatcattttattatgtatggaaaagttatgtgcatgttgtagacggttgtaattcatcaacttgtatgatgtgttacaaacgtaatagagcaacaagagtcgaatgtacaactattgttaatggtgttagaaggtccttttatgtctatgctaatggaggtaaaggcttttgcaaactacacaattggaattgtgttaattgtgatacattctgtgctggtagtacatttattagtgatgaagttgcgagagacttgtcactacagtttaaaagaccaataaatcctactgaccagtcttcttacatcgttgatagtgttacagtgaagaatggttccatccatctttactttgataaagctggtcaaaagacttatgaaagacattctctctctcattttgttaacttagacaacctgagagctaataacactaaaggttcattgcctattaatgttatagtttttgatggtaaatcaaaatgtgaagaatcatctgcaaaatcagcgtctgtttactacagtcagcttatgtgtcaacctatactgttactagatcaggcattagtgtctgatgttggtgatagtgcggaagttgcagttaaaatgtttgatgcttacgttaatacgttttcatcaacttttaacgtaccaatggaaaaactcaaaacactagttgcaactgcagaagctgaacttgcaaagaatgtgtccttagacaatgtcttatctacttttatttcagcagctcggcaagggtttgttgattcagatgtagaaactaaagatgttgttgaatgtcttaaattgtcacatcaatctgacatagaagttactggcgatagttgtaataactatatgctcacctataacaaagttgaaaacatgacaccccgtgaccttggtgcttgtattgactgtagtgcgcgtcatattaatgcgcaggtagcaaaaagtcacaacattgctttgatatggaacgttaaagatttcatgtcattgtctgaacaactacgaaaacaaatacgtagtgctgctaaaaagaataacttaccttttaagttgacatgtgcaactactagacaagttgttaatgttgtaacaacaaagatagcacttaagggtggtaaaattgttaataattggttgaagcagttaattaaagttacacttgtgttcctttttgttgctgctattttctatttaataacacctgttcatgtcatgtctaaacatactgacttttcaagtgaaatcataggatacaaggctattgatggtggtgtcactcgtgacatagcatctacagatacttgttttgctaacaaacatgctgattttgacacatggtttagccagcgtggtggtagttatactaatgacaaagcttgcccattgattgctgcagtcataacaagagaagtgggttttgtcgtgcctggtttgcctggcacgatattacgcacaactaatggtgactttttgcatttcttacctagagtttttagtgcagttggtaacatctgttacacaccatcaaaacttatagagtacactgactttgcaacatcagcttgtgttttggctgctgaatgtacaatttttaaagatgcttctggtaagccagtaccatattgttatgataccaatgtactagaaggttctgttgcttatgaaagtttacgccctgacacacgttatgtgctcatggatggctctattattcaatttcctaacacctaccttgaaggttctgttagagtggtaacaacttttgattctgagtactgtaggcacggcacttgtgaaagatcagaagctggtgtttgtgtatctactagtggtaggtgggtacttaacaatgattattacagatctttaccaggagttttctgtggtgtagatgctgtaaatttacttactaatatgtttacaccactaattcaacctattggtgctttggacatatcagcatctatagtagctggtggtattgtagctatcgtagtaacatgccttgcctactattttatgaggtttagaagagcttttggtgaatacagtcatgtagttgcctttaatactttactattccttatgtcattcactgtactctgtttaacaccagtttactcattcttacctggtgtttattctgttatttacttgtacttgacattttatcttactaatgatgtttcttttttagcacatattcagtggatggttatgttcacacctttagtacctttctggataacaattgcttatatcatttgtatttccacaaagcatttctattggttctttagtaattacctaaagagacgtgtagtctttaatggtgtttcctttagtacttttgaagaagctgcgctgtgcacctttttgttaaataaagaaatgtatctaaagttgcgtagtgatgtgctattacctcttacgcaatataatagatacttagctctttataataagtacaagtattttagtggagcaatggatacaactagctacagagaagctgcttgttgtcatctcgcaaaggctctcaatgacttcagtaactcaggttctgatgttctttaccaaccaccacaaacctctatcacctcagctgttttgcagagtggttttagaaaaatggcattcccatctggtaaagttgagggttgtatggtacaagtaacttgtggtacaactacacttaacggtctttggcttgatgacgtagtttactgtccaagacatgtgatctgcacctctgaagacatgcttaaccctaattatgaagatttactcattcgtaagtctaatcataatttcttggtacaggctggtaatgttcaactcagggttattggacattctatgcaaaattgtgtacttaagcttaaggttgatacagccaatcctaagacacctaagtataagtttgttcgcattcaaccaggacagactttttcagtgttagcttgttacaatggttcaccatctggtgtttaccaatgtgctatgaggcccaatttcactattaagggttcattccttaatggttcatgtggtagtgttggttttaacatagattatgactgtgtctctttttgttacatgcaccatatggaattaccaactggagttcatgctggcacagacttagaaggtaacttttatggaccttttgttgacaggcaaacagcacaagcagctggtacggacacaactattacagttaatgttttagcttggttgtacgctgctgttataaatggagacaggtggtttctcaatcgatttaccacaactcttaatgactttaaccttgtggctatgaagtacaattatgaacctctaacacaagaccatgttgacatactaggacctctttctgctcaaactggaattgccgttttagatatgtgtgcttcattaaaagaattactgcaaaatggtatgaatggacgtaccatattgggtagtgctttattagaagatgaatttacaccttttgatgttgttagacaatgctcaggtgttactttccaaagtgcagtgaaaagaacaatcaagggtacacaccactggttgttactcacaattttgacttcacttttagttttagtccagagtactcaatggtctttgttcttttttttgtatgaaaatgcctttttaccttttgctatgggtattattgctatgtctgcttttgcaatgatgtttgtcaaacataagcatgcatttctctgtttgtttttgttaccttctcttgccactgtagcttattttaatatggtctatatgcctgctagttgggtgatgcgtattatgacatggttggatatggttgatactagtttgtctggttttaagctaaaagactgtgttatgtatgcatcagctgtagtgttactaatccttatgacagcaagaactgtgtatgatgatggtgctaggagagtgtggacacttatgaatgtcttgacactcgtttataaagtttattatggtaatgctttagatcaagccatttccatgtgggctcttataatctctgttacttctaactactcaggtgtagttacaactgtcatgtttttggccagaggtattgtttttatgtgtgttgagtattgccctattttcttcataactggtaatacacttcagtgtataatgctagtttattgtttcttaggctatttttgtacttgttactttggcctcttttgtttactcaaccgctactttagactgactcttggtgtttatgattacttagtttctacacaggagtttagatatatgaattcacagggactactcccacccaagaatagcatagatgccttcaaactcaacattaaattgttgggtgttggtggcaaaccttgtatcaaagtagccactgtacagtctaaaatgtcagatgtaaagtgcacatcagtagtcttactctcagttttgcaacaactcagagtagaatcatcatctaaattgtgggctcaatgtgtccagttacacaatgacattctcttagctaaagatactactgaagcctttgaaaaaatggtttcactactttctgttttgctttccatgcagggtgctgtagacataaacaagctttgtgaagaaatgctggacaacagggcaaccttacaagctatagcctcagagtttagttcccttccatcatatgcagcttttgctactgctcaagaagcttatgagcaggctgttgctaatggtgattctgaagttgttcttaaaaagttgaagaagtctttgaatgtggctaaatctgaatttgaccgtgatgcagccatgcaacgtaagttggaaaagatggctgatcaagctatgacccaaatgtataaacaggctagatctgaggacaagagggcaaaagttactagtgctatgcagacaatgcttttcactatgcttagaaagttggataatgatgcactcaacaacattatcaacaatgcaagagatggttgtgttcccttgaacataatacctcttacaacagcagccaaactaatggttgtcataccagactataacacatataaaaatacgtgtgatggtacaacatttacttatgcatcagcattgtgggaaatccaacaggttgtagatgcagatagtaaaattgttcaacttagtgaaattagtatggacaattcacctaatttagcatggcctcttattgtaacagctttaagggccaattctgctgtcaaattacagaataatgagcttagtcctgttgcactacgacagatgtcttgtgctgccggtactacacaaactgcttgcactgatgacaatgcgttagcttactacaacacaacaaagggaggtaggtttgtacttgcactgttatccgatttacaggatttgaaatgggctagattccctaagagtgatggaactggtactatctatacagaactggaaccaccttgtaggtttgttacagacacacctaaaggtcctaaagtgaagtatttatactttattaaaggattaaacaacctaaatagaggtatggtacttggtagtttagctgccacagtacgtctacaagctggtaatgcaacagaagtgcctgccaattcaactgtattatctttctgtgcttttgctgtagatgctgctaaagcttacaaagattatctagctagtgggggacaaccaatcactaattgtgttaagatgttgtgtacacacactggtactggtcaggcaataacagttacaccggaagccaatatggatcaagaatcgcttggtggtgcatcgtgttgtctgtactgccgttgccacatagatcatccaaatcctaaaggattttgtgacttaaaaggtaagtatgtacaaatacctacaacttgtgctaatgaccctgtgggttttacacttaaaaacacagtctgtaccgtctgcggtatgtggaaaggttatggctgtagttgtgatcaactccgcgaacccatgcttcagtcagctgatgcacaatcgtttttaaacgggtttgcggtgtaagtgcagcccgtcttacaccgtgcggcacaggcactagtactgatgtcgtatacagggcttttgacatctacaatgataaagtagctggttttgctaaattcctaaaaactaattgttgtcgcttccaagaaaaggacgaagatgacaatttaattgattcttactttgtagttaagagacacactttctctaactaccaacatgaagaaacaatttataatttacttaaggattgtccagctgttgctaaacatgacttctttaagtttagaatagacggtgacatggtaccacatatatcacgtcaacgtcttactaaatacacaatggcagacctcgtctatgctttaaggcattttgatgaaggtaattgtgacacattaaaagaaatacttgtcacatacaattgttgtgatgatgattatttcaataaaaaggactggtatgattttgtagaaaacccagatatattacgcgtatacgccaacttaggtgaacgtgtacgccaagctttgttaaaaacagtacaattctgtgatgccatgcgaaatgctggtattgttggtgtactgacattagataatcaagatctcaatggtaactggtatgatttcggtgatttcatacaaaccacgccaggtagtggagttcctgttgtagattcttattattcattgttaatgcctatattaaccttgaccagggctttaactgcagagtcacatgttgacactgacttaacaaagccttacattaagtgggatttgttaaaatatgacttcacggaagagaggttaaaactctttgaccgttattttaaatattgggatcagacataccacccaaattgtgttaactgtttggatgacagatgcattctgcattgtgcaaactttaatgttttattctctacagtgttcccacctacaagttttggaccactagtgagaaaaatatttgttgatggtgttccatttgtagtttcaactggataccacttcagagagctaggtgttgtacataatcaggatgtaaacttacatagctctagacttagttttaaggaattacttgtgtatgctgctgaccctgctatgcacgctgcttctggtaatctattactagataaacgcactacgtgcttttcagtagctgcacttactaacaatgttgcttttcaaactgtcaaacccggtaattttaacaaagacttctatgactttgctgtgtctaagggtttctttaaggaaggaagttctgttgaattaaaacacttcttctttgctcaggatggtaatgctgctatcagcgattatgactactatcgttataatctaccaacaatgtgtgatatcagacaactactatttgtagttgaagttgttgataagtactttgattgttacgatggtggctgtattaatgctaaccaagtcatcgtcaacaacctagacaaatcagctggttttccatttaataaatggggtaaggctagactttattatgattcaatgagttatgaggatcaagatgcacttttcgcatatacaaaacgtaatgtcatccctactataactcaaatgaatcttaagtatgccattagtgcaaagaatagagctcgcaccgtagctggtgtctctatctgtagtactatgaccaatagacagtttcatcaaaaattattgaaatcaatagccgccactagaggagctactgtagtaattggaacaagcaaattctatggtggttggcacaacatgttaaaaactgtttatagtgatgtagaaaaccctcaccttatgggttgggattatcctaaatgtgatagagccatgcctaacatgcttagaattatggcctcacttgttcttgctcgcaaacatacaacgtgttgtagcttgtcacaccgtttctatagattagctaatgagtgtgctcaagtattgagtgaaatggtcatgtgtggcggttcactatatgttaaaccaggtggaacctcatcaggagatgccacaactgcttatgctaatagtgtttttaacatttgtcaagctgtcacggccaatgttaatgcacttttatctactgatggtaacaaaattgccgataagtatgtccgcaatttacaacacagactttatgagtgtctctatagaaatagagatgttgacacagactttgtgaatgagttttacgcatatttgcgtaaacatttctcaatgatgatactctctgacgatgctgttgtgtgtttcaatagcacttatgcatctcaaggtctagtggctagcataaagaactttaagtcagttctttattatcaaaacaatgtttttatgtctgaagcaaaatgttggactgagactgaccttactaaaggacctcatgaattttgctctcaacatacaatgctagttaaacagggtgatgattatgtgtaccttccttacccagatccatcaagaatcctaggggccggctgttttgtagatgatatcgtaaaaacagatggtacacttatgattgaacggttcgtgtctttagctatagatgcttacccacttactaaacatcctaatcaggagtatgctgatgtctttcatttgtacttacaatacataagaaagctacatgatgagttaacaggacacatgttagacatgtattctgttatgcttactaatgataacacttcaaggtattgggaacctgagttttatgaggctatgtacacaccgcatacagtcttacaggctgttggggcttgtgttctttgcaattcacagacttcattaagatgtggtgcttgcatacgtagaccattcttatgttgtaaatgctgttacgaccatgtcatatcaacatcacataaattagtcttgtctgttaatccgtatgtttgcaatgctccaggttgtgatgtcacagatgtgactcaactttacttaggaggtatgagctattattgtaaatcacataaaccacccattagttttccattgtgtgctaatggacaagtttttggtttatataaaaatacatgtgttggtagcgataatgttactgactttaatgcaattgcaacatgtgactggacaaatgctggtgattacattttagctaacacctgtactgaaagactcaagctttttgcagcagaaacgctcaaagctactgaggagacatttaaactgtcttatggtattgctactgtacgtgaagtgctgtctgacagagaattacatctttcatgggaagttggtaaacctagaccaccacttaaccgaaattatgtctttactggttatcgtgtaactaaaaacagtaaagtacaaataggagagtacacctttgaaaaaggtgactatggtgatgctgttgtttaccgaggtacaacaacttacaaattaaatgttggtgattattttgtgctgacatcacatacagtaatgccattaagtgcacctacactagtgccacaagagcactatgttagaattactggcttatacccaacactcaatatctcagatgagttttctagcaatgttgcaaattatcaaaaggttggtatgcaaaagtattctacactccagggaccacctggtactggtaagagtcattttgctattggcctagctctctactacccttctgctcgcatagtgtatacagcttgctctcatgccgctgttgatgcactatgtgagaaggcattaaaatatttgcctatagataaatgtagtagaattatacctgcacgtgctcgtgtagagtgttttgataaattcaaagtgaattcaacattagaacagtatgtcttttgtactgtaaatgcattgcctgagacgacagcagatatagttgtctttgatgaaatttcaatggccacgaattatgatttgagtgttgtcaatgccagattacgtgctaagcactatgtgtacattggcgaccctgctcaattacctgcaccacgcacattgctaactaagggcacactagaaccagaatatttcaattcagtgtgtagacttatgaaaactataggtccagacatgttcctcggaacttgtcggcgttgtcctgctgaaattgttgacactgtgagtgctttggtttatgataataagcttaaagcacataaagacaaatcagctcaatgctttaaaatgttttataagggtgttatcacgcatgatgtttcatctgcaattaacaggccacaaataggcgtggtaagagaattccttacacgtaaccctgcttggagaaaagctgtctttatttcaccttataattcacagaatgctgtagcctcaaagattttgggactaccaactcaaactgttgattcatcacagggctcagaatatgactatgtcatattcactcaaaccactgaaacagctcactcttgtaatgtaaacagatttaatgttgctattaccagagcaaaagtaggcatactttgcataatgtctgatagagacctttatgacaagttgcaatttacaagtcttgaaattccacgtaggaatgtggcaactttacaagctgaaaatgtaacaggactctttaaagattgtagtaaggtaatcactgggttacatcctacacaggcacctacacacctcagtgttgacactaaattcaaaactgaaggtttatgtgttgacatacctggcatacctaaggacatgacctatagaagactcatctctatgatgggttttaaaatgaattatcaagttaatggttaccctaacatgtttatcacccgcgaagaagctataagacatgtacgtgcatggattggcttcgatgtcgaggggtgtcatgctactagagaagctgttggtaccaatttacctttacagctaggtttttctacaggtgttaacctagttgctgtacctacaggttatgttgatacacctaataatacagatttttccagagttagtgctaaaccaccgcctggagatcaatttaaacacctcataccacttatgtacaaaggacttccttggaatgtagtgcgtataaagattgtacaaatgttaagtgacacacttaaaaatctctctgacagagtcgtatttgtcttatgggcacatggctttgagttgacatctatgaagtattttgtgaaaataggacctgagcgcacctgttgtctatgtgatagacgtgccacatgcttttccactgcttcagacacttatgcctgttggcatcattctattggatttgattacgtctataatccgtttatgattgatgttcaacaatggggttttacaggtaacctacaaagcaaccatgatctgtattgtcaagtccatggtaatgcacatgtagctagttgtgatgcaatcatgactaggtgtctagctgtccacgagtgctttgttaagcgtgttgactggactattgaatatcctataattggtgatgaactgaagattaatgcggcttgtagaaaggttcaacacatggttgttaaagctgcattattagcagacaaattcccagttcttcacgacattggtaaccctaaagctattaagtgtgtacctcaagctgatgtagaatggaagttctatgatgcacagccttgtagtgacaaagcttataaaatagaagaattattctattcttatgccacacattctgacaaattcacagatggtgtatgcctattttggaattgcaatgtcgatagatatcctgctaattccattgtttgtagatttgacactagagtgctatctaaccttaacttgcctggttgtgatggtggcagtttgtatgtaaataaacatgcattccacacaccagcttttgataaaagtgcttttgttaatttaaaacaattaccatttttctattactctgacagtccatgtgagtctcatggaaaacaagtagtgtcagatatagattatgtaccactaaagtctgctacgtgtataacacgttgcaatttaggtggtgctgtctgtagacatcatgctaatgagtacagattgtatctcgatgcttataacatgatgatctcagctggctttagcttgtgggtttacaaacaatttgatacttataacctctggaacacttttacaagacttcagagtttagaaaatgtggcttttaatgttgtaaataagggacactttgatggacaacagggtgaagtaccagtttctatcattaataacactgtttacacaaaagttgatggtgttgatgtagaattgtttgaaaataaaacaacattacctgttaatgtagcatttgagctttgggctaagcgcaacattaaaccagtaccagaggtgaaaatactcaataatttgggtgtggacattgctgctaatactgtgatctgggactacaaaagagatgctccagcacatatatctactattggtgtttgttctatgactgacatagccaagaaaccaactgaaacgatttgtgcaccactcactgtcttttttgatggtagagttgatggtcaagtagacttatttagaaatgcccgtaatggtgttcttattacagaaggtagtgttaaaggtttacaaccatctgtaggtcccaaacaagctagtcttaatggagtcacattaattggagaagccgtaaaaacacagttcaattattataagaaagttgatggtgttgtccaacaattacctgaaacttactttactcagagtagaaatttacaagaatttaaacccaggagtcaaatggaaattgatttcttagaattagctatggatgaattcattgaacggtataaattagaaggctatgccttcgaacatatcgtttatggagattttagtcatagtcagttaggtggtttacatctactgattggactagctaaacgttttaaggaatcaccttttgaattagaagattttattcctatggacagtacagttaaaaactatttcataacagatgcgcaaacaggttcatctaagtgtgtgtgttctgttattgatttattacttgatgattttgttgaaataataaaatcccaagatttatctgtagtttctaaggttgtcaaagtgactattgactatacagaaatttcatttatgctttggtgtaaagatggccatgtagaaacattttacccaaaattacaatctagtcaagcgtggcaaccgggtgttgctatgcctaatctttacaaaatgcaaagaatgctattagaaaagtgtgaccttcaaaattatggtgatagtgcaacattacctaaaggcataatgatgaatgtcgcaaaatatactcaactgtgtcaatatttaaacacattaacattagctgtaccctataatatgagagttatacattttggtgctggttctgataaaggagttgcaccaggtacagctgttttaagacagtggttgcctacgggtacgctgcttgtcgattcagatcttaatgactttgtctctgatgcagattcaactttgattggtgattgtgcaactgtacatacagctaataaatgggatctcattattagtgatatgtacgaccctaagactaaaaatgttacaaaagaaaatgactctaaagagggttttttcacttacatttgtgggtttatacaacaaaagctagctcttggaggttccgtggctataaagataacagaacattcttggaatgctgatctttataagctcatgggacacttcgcatggtggacagcctttgttactaatgtgaatgcgtcatcatctgaagcatttttaattggatgtaattatcttggcaaaccacgcgaacaaatagatggttatgtcatgcatgcaaattacatattttggaggaatacaaatccaattcagttgtcttcctattctttatttgacatgagtaaatttccccttaaattaaggggtactgctgttatgtctttaaaagaaggtcaaatcaatgatatgattttatctcttcttagtaaaggtagacttataattagagaaaacaacagagttgttatttctagtgatgttcttgttaacaactaaacgaacaatgtttgtttttcttgttttattgccactagtctctagtcagtgtgttaatcttacaaccagaactcaattaccccctgcatacactaattctttcacacgtggtgtttattaccctgacaaagttttcagatcctcagttttacattcaactcaggacttgttcttacctttcttttccaatgttacttggttccatgctatacatgtctctgggaccaatggtactaagaggtttgataaccctgtcctaccatttaatgatggtgtttattttgcttccactgagaagtctaacataataagaggctggatttttggtactactttagattcgaagacccagtccctacttattgttaataacgctactaatgttgttattaaagtctgtgaatttcaattttgtaatgatccatttttgggtgtttattaccacaaaaacaacaaaagttggatggaaagtgagttcagagtttattctagtgcgaataattgcacttttgaatatgtctctcagccttttcttatggaccttgaaggaaaacagggtaatttcaaaaatcttagggaatttgtgtttaagaatattgatggttattttaaaatatattctaagcacacgcctattaatttagtgcgtgatctccctcagggtttttcggctttagaaccattggtagatttgccaataggtattaacatcactaggtttcaaactttacttgctttacatagaagttatttgactcctggtgattcttcttcaggttggacagctggtgctgcagcttattatgtgggttatcttcaacctaggacttttctattaaaatataatgaaaatggaaccattacagatgctgtagactgtgcacttgaccctctctcagaaacaaagtgtacgttgaaatccttcactgtagaaaaaggaatctatcaaacttctaactttagagtccaaccaacagaatctattgttagatttcctaatattacaaacttgtgcccttttggtgaagtttttaacgccaccagatttgcatctgtttatgcttggaacaggaagagaatcagcaactgtgttgctgattattctgtcctatataattccgcatcattttccacttttaagtgttatggagtgtctcctactaaattaaatgatctctgctttactaatgtctatgcagattcatttgtaattagaggtgatgaagtcagacaaatcgctccagggcaaactggaaagattgctgattataattataaattaccagatgattttacaggctgcgttatagcttggaattctaacaatcttgattctaaggttggtggtaattataattacctgtatagattgtttaggaagtctaatctcaaaccttttgagagagatatttcaactgaaatctatcaggccggtagcacaccttgtaatggtgttgaaggttttaattgttactttcctttacaatcatatggtttccaacccactaatggtgttggttaccaaccatacagagtagtagtactttcttttgaacttctacatgcaccagcaactgtttgtggacctaaaaagtctactaatttggttaaaaacaaatgtgtcaatttcaacttcaatggtttaacaggcacaggtgttcttactgagtctaacaaaaagtttctgcctttccaacaatttggcagagacattgctgacactactgatgctgtccgtgatccacagacacttgagattcttgacattacaccatgttcttttggtggtgtcagtgttataacaccaggaacaaatacttctaaccaggttgctgttctttatcaggatgttaactgcacagaagtccctgttgctattcatgcagatcaacttactcctacttggcgtgtttattctacaggttctaatgtttttcaaacacgtgcaggctgtttaataggggctgaacatgtcaacaactcatatgagtgtgacatacccattggtgcaggtatatgcgctagttatcagactcagactaattctcctcggcgggcacgtagtgtagctagtcaatccatcattgcctacactatgtcacttggtgcagaaaattcagttgcttactctaataactctattgccatacccacaaattttactattagtgttaccacagaaattctaccagtgtctatgaccaagacatcagtagattgtacaatgtacatttgtggtgattcaactgaatgcagcaatcttttgttgcaatatggcagtttttgtacacaattaaaccgtgctttaactggaatagctgttgaacaagacaaaaacacccaagaagtttttgcacaagtcaaacaaatttacaaaacaccaccaattaaagattgtggtggttttaatttttcacaaatattaccagatccatcaaaaccaagcaagaggtcatttattgaagatctacttttcaacaaagtgacacttgcagatgctggcttcatcaaacaatatggtgattgccttggtgatattgctgctagagacctcatttgtgcacaaaagtttaacggccttactgttttgccacctttgctcacagatgaaatgattgctcaatacacttctgcactgttagcgggtacaatcacttctggttggacctttggtgcaggtgctgcattacaaataccatttgctatgcaaatggcttataggtttaatggtattggagttacacagaatgttctctatgagaaccaaaaattgattgccaaccaatttaatagtgctattggcaaaattcaagactcactttcttccacagcaagtgcacttggaaaacttcaagatgtggtcaaccaaaatgcacaagctttaaacacgcttgttaaacaacttagctccaattttggtgcaatttcaagtgttttaaatgatatcctttcacgtcttgacaaagttgaggctgaagtgcaaattgataggttgatcacaggcagacttcaaagtttgcagacatatgtgactcaacaattaattagagctgcagaaatcagagcttctgctaatcttgctgctactaaaatgtcagagtgtgtacttggacaatcaaaaagagttgatttttgtggaaagggctatcatcttatgtccttccctcagtcagcacctcatggtgtagtcttcttgcatgtgacttatgtccctgcacaagaaaagaacttcacaactgctcctgccatttgtcatgatggaaaagcacactttcctcgtgaaggtgtctttgtttcaaatggcacacactggtttgtaacacaaaggaatttttatgaaccacaaatcattactacagacaacacatttgtgtctggtaactgtgatgttgtaataggaattgtcaacaacacagtttatgatcctttgcaacctgaattagactcattcaaggaggagttagataaatattttaagaatcatacatcaccagatgttgatttaggtgacatctctggcattaatgcttcagttgtaaacattcaaaaagaaattgaccgcctcaatgaggttgccaagaatttaaatgaatctctcatcgatctccaagaacttggaaagtatgagcagtatataaaatggccatggtacatttggctaggttttatagctggcttgattgccatagtaatggtgacaattatgctttgctgtatgaccagttgctgtagttgtctcaagggctgttgttcttgtggatcctgctgcaaatttgatgaagacgactctgagccagtgctcaaaggagtcaaattacattacacataaacgaacttatggatttgtttatgagaatcttcacaattggaactgtaactttgaagcaaggtgaaatcaaggatgctactccttcagattttgttcgcgctactgcaacgataccgatacaagcctcactccctttcggatggcttattgttggcgttgcacttcttgctgtttttcagagcgcttccaaaatcataaccctcaaaaagagatggcaactagcactctccaagggtgttcactttgtttgcaacttgctgttgttgtttgtaacagtttactcacaccttttgctcgttgctgctggccttgaagccccttttctctatctttatgctttagtctacttcttgcagagtataaactttgtaagaataataatgaggctttggctttgctggaaatgccgttccaaaaacccattactttatgatgccaactattttctttgctggcatactaattgttacgactattgtataccttacaatagtgtaacttcttcaattgtcattacttcaggtgatggcacaacaagtcctatttctgaacatgactaccagattggtggttatactgaaaaatgggaatctggagtaaaagactgtgttgtattacacagttacttcacttcagactattaccagctgtactcaactcaattgagtacagacactggtgttgaacatgttaccttcttcatctacaataaaattgttgatgagcctgaagaacatgtccaaattcacacaatcgacgtttcatccggagttgttaatccagtaatggaaccaatttatgatgaaccgacgacgactactagcgtgcctttgtaagcacaagctgatgagtacgaacttatgtactcattcgtttcggaagagacaggtacgttaatagttaatagcgtacttctttttcttgctttcgtggtattcttgctagttacactagccatccttactgcgcttcgattgtgtgcgtactgctgcaatattgttaacgtgagtcttgtaaaaccttctttttacgtttactctcgtgttaaaaatctgaattcttctagagttcctgatcttctggtctaaacgaactaaatattatattagtttttctgtttggaactttaattttagccatggcagattccaacggtactattaccgttgaagagcttaaaaagctccttgaacaatggaacctagtaataggtttcctattccttacatggatttgtcttctacaatttgcctatgccaacaggaataggtttttgtatataattaagttaattttcctctggctgttatggccagtaactttagcttgttttgtgcttgctgctgtttacagaataaattggatcaccggtggaattgctatcgcaatggcttgtcttgtaggcttgatgtggctcagctacttcattgcttctttcagactgtttgcgcgtacgcgttccatgtggtcattcaatccagaaactaacattcttctcaacgtgccactccatggcactattctgaccagaccgcttctagaaagtgaactcgtaatcggagctgtgatccttcgtggacatcttcgtattgctggacaccatctaggacgctgtgacatcaaggacctgcctaaagaaatcactgttgctacatcacgaacgctttcttattacaaattgggagcttcgcagcgtgtagcaggtgactcaggttttgctgcatacagtcgctacaggattggcaactataaattaaacacagaccattccagtagcagtgacaatattgctttgcttgtacagtaagtgacaacagatgtttcatctcgttgactttcaggttactatagcagagatattactaattattatgaggacttttaaagtttccatttggaatcttgattacatcataaacctcataattaaaaatttatctaagtcactaactgagaataaatattctcaattagatgaagagcaaccaatggagattgattaaacgaacatgaaaattattcttttcttggcactgataacactcgctacttgtgagctttatcactaccaagagtgtgttagaggtacaacagtacttttaaaagaaccttgctcttctggaacatacgagggcaattcaccatttcatcctctagctgataacaaatttgcactgacttgctttagcactcaatttgcttttgcttgtcctgacggcgtaaaacacgtctatcagttacgtgccagatcagtttcacctaaactgttcatcagacaagaggaagttcaagaactttactctccaatttttcttattgttgcggcaatagtgtttataacactttgcttcacactcaaaagaaagacagaatgattgaactttcattaattgacttctatttgtgctttttagcctttctgctattccttgttttaattatgcttattatcttttggttctcacttgaactgcaagatcataatgaaacttgtcacgcctaaacgaacatgaaatttcttgttttcttaggaatcatcacaactgtagctgcatttcaccaagaatgtagtttacagtcatgtactcaacatcaaccatatgtagttgatgacccgtgtcctattcacttctattctaaatggtatattagagtaggagctagaaaatcagcacctttaattgaattgtgcgtggatgaggctggttctaaatcacccattcagtacatcgatatcggtaattatacagtttcctgtttaccttttacaattaattgccaggaacctaaattgggtagtcttgtagtgcgttgttcgttctatgaagactttttagagtatcatgacgttcgtgttgttttagatttcatctaaacgaacaaactaaaatgtctgataatggaccccaaaatcagcgaaatgcaccccgcattacgtttggtggaccctcagattcaactggcagtaaccagaatggagaacgcagtggggcgcgatcaaaacaacgtcggccccaaggtttacccaataatactgcgtcttggttcaccgctctcactcaacatggcaaggaagaccttaaattccctcgaggacaaggcgttccaattaacaccaatagcagtccagatgaccaaattggctactaccgaagagctaccagacgaattcgtggtggtgacggtaaaatgaaagatctcagtccaagatggtatttctactacctaggaactgggccagaagctggacttccctatggtgctaacaaagacggcatcatatgggttgcaactgagggagccttgaatacaccaaaagatcacattggcacccgcaatcctgctaacaatgctgcaatcgtgctacaacttcctcaaggaacaacattgccaaaaggcttctacgcagaagggagcagaggcggcagtcaagcctcttctcgttcctcatcacgtagtcgcaacagttcaagaaattcaactccaggcagcagtaggggaacttctcctgctagaatggctggcaatggcggtgatgctgctcttgctttgctgctgcttgacagattgaaccagcttgagagcaaaatgtctggtaaaggccaacaacaacaaggccaaactgtcactaagaaatctgctgctgaggcttctaagaagcctcggcaaaaacgtactgccactaaagcatacaatgtaacacaagctttcggcagacgtggtccagaacaaacccaaggaaattttggggaccaggaactaatcagacaaggaactgattacaaacattggccgcaaattgcacaatttgcccccagcgcttcagcgttcttcggaatgtcgcgcattggcatggaagtcacaccttcgggaacgtggttgacctacacaggtgccatcaaattggatgacaaagatccaaatttcaaagatcaagtcattttgctgaataagcatattgacgcatacaaaacattcccaccaacagagcctaaaaaggacaaaaagaagaaggctgatgaaactcaagccttaccgcagagacagaagaaacagcaaactgtgactcttcttcctgctgcagatttggatgatttctccaaacaattgcaacaatccatgagcagtgctgactcaactcaggcctaaactcatgcagaccacacaaggcagatgggctatataaacgttttcgcttttccgtttacgatatatagtctactcttgtgcagaatgaattctcgtaactacatagcacaagtagatgtagttaactttaatctcacatagcaatctttaatcagtgtgtaacattagggaggacttgaaagagccaccacattttcaccgaggccacgcggagtacgatcgagtgtacagtgaacaatgctagggagagctgcctatatggaagagccctaatgtgtaaaattaattttagtagtgctatccccatgtgattttaatagcttcttaggagaatgacaaaaaaaaaaaaaaaa

SEQ ID NO: 5 - DNA, 29870 bp, SARS-CoV-2
attaaaggtttataccttcccaggtaacaaaccaaccaactttcgatctcttgtagatctgttctctaaacgaactttaaaatctgtgtggctgtcactcggctgcatgcttagtgcactcacgcagtataattaataactaattactgtcgttgacaggacacgagtaactcgtctatcttctgcaggctgcttacggtttcgtccgtgttgcagccgatcatcagcacatctaggtttcgtccgggtgtgaccgaaaggtaagatggagagccttgtccctggtttcaacgagaaaacacacgtccaactcagtttgcctgttttacaggttcgcgacgtgctcgtacgtggctttggagactccgtggaggaggtcttatcagaggcacgtcaacatcttaaagatggcacttgtggcttagtagaagttgaaaaaggcgttttgcctcaacttgaacagccctatgtgttcatcaaacgttcggatgctcgaactgcacctcatggtcatgttatggttgagctggtagcagaactcgaaggcattcagtacggtcgtagtggtgagacacttggtgtccttgtccctcatgtgggcgaaataccagtggcttaccgcaaggttcttcttcgtaagaacggtaataaaggagctggtggccatagttacggcgccgatctaaagtcatttgacttaggcgacgagcttggcactgatccttatgaagattttcaagaaaactggaacactaaacatagcagtggtgttacccgtgaactcatgcgtgagcttaacggaggggcatacactcgctatgtcgataacaacttctgtggccctgatggctaccctcttgagtgcattaaagaccttctagcacgtgctggtaaagcttcatgcactttgtccgaacaactggactttattgacactaagaggggtgtatactgctgccgtgaacatgagcatgaaattgcttggtacacggaacgttctgaaaagagctatgaattgcagacaccttttgaaattaaattggcaaagaaatttgacaccttcaatggggaatgtccaaattttgtatttcccttaaattccataatcaagactattcaaccaagggttgaaaagaaaaagcttgatggctttatgggtagaattcgatctgtctatccagttgcgtcaccaaatgaatgcaaccaaatgtgcctttcaactctcatgaagtgtgatcattgtggtgaaacttcatggcagacgggcgattttgttaaagccacttgcgaattttgtggcactgagaatttgactaaagaaggtgccactacttgtggttacttaccccaaaatgctgttgttaaaatttattgtccagcatgtcacaattcagaagtaggacctgagcatagtcttgccgaataccataatgaatctggcttgaaaaccattcttcgtaagggtggtcgcactattgcctttggaggctgtgtgttctcttatgttggttgccataacaagtgtgcctattgggttccacgtgctagcgctaacataggttgtaaccatacaggtgttgttggagaaggttccgaaggtcttaatgacaaccttcttgaaatactccaaaaagagaaagtcaacatcaatattgttggtgactttaaacttaatgaagagatcgccattattttggcatctttttctgcttccacaagtgcttttgtggaaactgtgaaaggtttggattataaagcattcaaacaaattgttgaatcctgtggtaattttaaagttacaaaaggaaaagctaaaaaaggtgcctggaatattggtgaacagaaatcaatactgagtcctctttatgcatttgcatcagaggctgctcgtgttgtacgatcaattttctcccgcactcttgaaactgctcaaaattctgtgcgtgttttacagaaggccgctataacaatactagatggaatttcacagtattcactgagactcattgatgctatgatgttcacatctgatttggctactaacaatctagttgtaatggcctacattacaggtggtgttgttcagttgacttcgcagtggctaactaacatctttggcactgtttatgaaaaactcaaacccgtccttgattggcttgaagagaagtttaaggaaggtgtagagtttcttagagacggttgggaaattgttaaatttatctcaacctgtgcttgtgaaattgtcggtggacaaattgtcacctgtgcaaaggaaattaaggagagtgttcagacattctttaagcttgtaaataaatttttggctttgtgtgctgactctatcattattggtggagctaaacttaaagccttgaatttaggtgaaacatttgtcacgcactcaaagggattgtacagaaagtgtgttaaatccagagaagaaactggcctactcatgcctctaaaagccccaaaagaaattatcttcttagagggagaaacacttcccacagaagtgttaacagaggaagttgtcttgaaaactggtgatttacaaccattagaacaacctactagtgaagctgttgaagctccattggttggtacaccagtttgtattaacgggcttatgttgctcgaaatcaaagacacagaaaagtactgtgcccttgcacctaatatgatggtaacaaacaataccttcacactcaaaggcggtgcaccaacaaaggttacttttggtgatgacactgtgatagaagtgcaaggttacaagagtgtgaatatcacttttgaacttgatgaaaggattgataaagtacttaatgagaagtgctctgcctatacagttgaactcggtacagaagtaaatgagttcgcctgtgttgtggcagatgctgtcataaaaactttgcaaccagtatctgaattacttacaccactgggcattgatttagatgagtggagtatggctacatactacttatttgatgagtctggtgagtttaaattggcttcacatatgtattgttctttctaccctccagatgaggatgaagaagaaggtgattgtgaagaagaagagtttgagccatcaactcaatatgagtatggtactgaagatgattaccaaggtaaacctttggaatttggtgccacttctgctgctcttcaacctgaagaagagcaagaagaagattggttagatgatgatagtcaacaaactgttggtcaacaagacggcagtgaggacaatcagacaactactattcaaacaattgttgaggttcaacctcaattagagatggaacttacaccagttgttcagactattgaagtgaatagttttagtggttatttaaaacttactgacaatgtatacattaaaaatgcagacattgtggaagaagctaaaaaggtaaaaccaacagtggttgttaatgcagccaatgtttaccttaaacatggaggaggtgttgcaggagccttaaataaggctactaacaatgccatgcaagttgaatctgatgattacatagctactaatggaccacttaaagtgggtggtagttgtgttttaagcggacacaatcttgctaaacactgtcttcatgttgtcggcccaaatgttaacaaaggtgaagacattcaacttcttaagagtgcttatgaaaattttaatcagcacgaagttctacttgcaccattattatcagctggtatttttggtgctgaccctatacattctttaagagtttgtgtagatactgttcgcacaaatgtctacttagctgtctttgataaaaatctctatgacaaacttgtttcaagctttttggaaatgaagagtgaaaagcaagttgaacaaaagatcgctgagattcctaaagaggaagttaagccatttataactgaaagtaaaccttcagttgaacagagaaaacaagatgataagaaaatcaaagcttgtgttgaagaagttacaacaactctggaagaaactaagttcctcacagaaaacttgttactttatattgacattaatggcaatcttcatccagattctgccactcttgttagtgacattgacatcactttcttaaagaaagatgctccatatatagtgggtgatgttgttcaagagggtgttttaactgctgtggttatacctactaaaaaggctggtggcactactgaaatgctagcgaaagctttgagaaaagtgccaacagacaattatataaccacttacccgggtcagggtttaaatggttacactgtagaggaggcaaagacagtgcttaaaaagtgtaaaagtgccttttacattctaccatctattatctctaatgagaagcaagaaattcttggaactgtttcttggaatttgcgagaaatgcttgcacatgcagaagaaacacgcaaattaatgcctgtctgtgtggaaactaaagccatagtttcaactatacagcgtaaatataagggtattaaaatacaagagggtgtggttgattatggtgctagattttacttttacaccagtaaaacaactgtagcgtcacttatcaacacacttaacgatctaaatgaaactcttgttacaatgccacttggctatgtaacacatggcttaaatttggaagaagctgctcggtatatgagatctctcaaagtgccagctacagtttctgtttcttcacctgatgctgttacagcgtataatggttatcttacttcttcttctaaaacacctgaagaacattttattgaaaccatctcacttgctggttcctataaagattggtcctattctggacaatctacacaactaggtatagaatttcttaagagaggtgataaaagtgtatattacactagtaatcctaccacattccacctagatggtgaagttatcacctttgacaatcttaagacacttctttctttgagagaagtgaggactattaaggtgtttacaacagtagacaacattaacctccacacgcaagttgtggacatgtcaatgacatatggacaacagtttggtccaacttatttggatggagctgatgttactaaaataaaacctcataattcacatgaaggtaaaacattttatgttttacctaatgatgacactctacgtgttgaggcttttgagtactaccacacaactgatcctagttttctgggtaggtacatgtcagcattaaatcacactaaaaagtggaaatacccacaagttaatggtttaacttctattaaatgggcagataacaactgttatcttgccactgcattgttaacactccaacaaatagagttgaagtttaatccacctgctctacaagatgcttattacagagcaagggctggtgaagctgctaacttttgtgcacttatcttagcctactgtaataagacagtaggtgagttaggtgatgttagagaaacaatgagttacttgtttcaacatgccaatttagattcttgcaaaagagtcttgaacgtggtgtgtaaaacttgtggacaacagcagacaacccttaagggtgtagaagctgttatgtacatgggcacactttcttatgaacaatttaagaaaggtgttcagataccttgtacgtgtggtaaacaagctacaaaatatctagtacaacaggagtcaccttttgttatgatgtcagcaccacctgctcagtatgaacttaagcatggtacatttacttgtgctagtgagtacactggtaattaccagtgtggtcactataaacatataacttctaaagaaactttgtattgcatagacggtgctttacttacaaagtcctcagaatacaaaggtcctattacggatgttttctacaaagaaaacagttacacaacaaccataaaaccagttacttataaattggatggtgttgtttgtacagaaattgaccctaagttggacaattattataagaaagacaattcttatttcacagagcaaccaattgatcttgtaccaaaccaaccatatccaaacgcaagcttcgataattttaagtttgtatgtgataatatcaaatttgctgatgatttaaaccagttaactggttataagaaacctgcttcaagagagcttaaagttacatttttccctgacttaaatggtgatgtggtggctattgattataaacactacacaccctcttttaagaaaggagctaaattgttacataaacctattgtttggcatgttaacaatgcaactaataaagccacgtataaaccaaatacctggtgtatacgttgtctttggagcacaaaaccagttgaaacatcaaattcgtttgatgtactgaagtcagaggacgcgcagggaatggataatcttgcctgcgaagatctaaaaccagtctctgaagaagtagtggaaaatcctaccatacagaaagacgttcttgagtgtaatgtgaaaactaccgaagttgtaggagacattatacttaaaccagcaaataatagtttaaaaattacagaagaggttggccacacagatctaatggctgcttatgtagacaattctagtcttactattaagaaacctaatgaattatctagagtattaggtttgaaaacccttgctactcatggtttagctgctgttaatagtgtcccttgggatactatagctaattatgctaagccttttcttaacaaagttgttagtacaactactaacatagttacacggtgtttaaaccgtgtttgtactaattatatgccttatttctttactttattgctacaattgtgtacttttactagaagtacaaattctagaattaaagcatctatgccgactactatagcaaagaatactgttaagagtgtcggtaaattttgtctagaggcttcatttaattatttgaagtcacctaatttttctaaactgataaatattataatttggtttttactattaagtgtttgcctaggttctttaatctactcaaccgctgctttaggtgttttaatgtctaatttaggcatgccttcttactgtactggttacagagaaggctatttgaactctactaatgtcactattgcaacctactgtactggttctataccttgtagtgtttgtcttagtggtttagattctttagacacctatccttctttagaaactatacaaattaccatttcatcttttaaatgggatttaactgcttttggcttagttgcagagtggtttttggcatatattcttttcactaggtttttctatgtacttggattggctgcaatcatgcaattgtttttcagctattttgcagtacattttattagtaattcttggcttatgtggttaataattaatcttgtacaaatggccccgatttcagctatggttagaatgtacatcttctttgcatcattttattatgtatggaaaagttatgtgcatgttgtagacggttgtaattcatcaacttgtatgatgtgttacaaacgtaatagagcaacaagagtcgaatgtacaactattgttaatggtgttagaaggtccttttatgtctatgctaatggaggtaaaggcttttgcaaactacacaattggaattgtgttaattgtgatacattctgtgctggtagtacatttattagtgatgaagttgcgagagacttgtcactacagtttaaaagaccaataaatcctactgaccagtcttcttacatcgttgatagtgttacagtgaagaatggttccatccatctttactttgataaagctggtcaaaagacttatgaaagacattctctctctcattttgttaacttagacaacctgagagctaataacactaaaggttcattgcctattaatgttatagtttttgatggtaaatcaaaatgtgaagaatcatctgcaaaatcagcgtctgtttactacagtcagcttatgtgtcaacctatactgttactagatcaggcattagtgtctgatgttggtgatagtgcggaagttgcagttaaaatgtttgatgcttacgttaatacgttttcatcaacttttaacgtaccaatggaaaaactcaaaacactagttgcaactgcagaagctgaacttgcaaagaatgtgtccttagacaatgtcttatctacttttatttcagcagctcggcaagggtttgttgattcagatgtagaaactaaagatgttgttgaatgtcttaaattgtcacatcaatctgacatagaagttactggcgatagttgtaataactatatgctcacctataacaaagttgaaaacatgacaccccgtgaccttggtgcttgtattgactgtagtgcgcgtcatattaatgcgcaggtagcaaaaagtcacaacattgctttgatatggaacgttaaagatttcatgtcattgtctgaacaactacgaaaacaaatacgtagtgctgctaaaaagaataacttaccttttaagttgacatgtgcaactactagacaagttgttaatgttgtaacaacaaagatagcacttaagggtggtaaaattgttaataattggttgaagcagttaattaaagttacacttgtgttcctttttgttgctgctattttctatttaataacacctgttcatgtcatgtctaaacatactgacttttcaagtgaaatcataggatacaaggctattgatggtggtgtcactcgtgacatagcatctacagatacttgttttgctaacaaacatgctgattttgacacatggtttagccagcgtggtggtagttatactaatgacaaagcttgcccattgattgctgcagtcataacaagagaagtgggttttgtcgtgcctggtttgcctggcacgatattacgcacaactaatggtgactttttgcatttcttacctagagtttttagtgcagttggtaacatctgttacacaccatcaaaacttatagagtacactgactttgcaacatcagcttgtgttttggctgctgaatgtacaatttttaaggatgcttctggtaagccagtaccatattgttatgataccaatgtactagaaggttctgttgcttatgaaagtttacgccctgacacacgttatgtgctcatggatggctctattattcaatttcctaacacctaccttgaaggttctgttagagtggtaacaacttttgattctgagtactgtaggcacggcacttgtgaaagatcagaagctggtgtttgtgtatctactagtggtagatgggtacttaacaatgattattacagatctttaccaggagttttctgtggtgtagatgctgtaaatttacttactaatatgtttacaccactaattcaacctattggtgctttggacatatcagcatctatagtagctggtggtattgtagctatcgtagtaacatgccttgcctactattttatgaggtttagaagagcttttggtgaatacagttatgtagttgcctttaatactttactattccttatgtcattcactgtactctgtttaacaccagtttactcattcttacctggtgtttattctgttatttacttgtacttgacattttatcttactaatgatgtttcttttttagcacatattcagtggatggttatgttcacacctttagtacctttctggataacaattgcttatatcatttgtatttccacaaagcatttctattggttctttagtaattacctaaagagacgtgtagtctttaatggtgtttcctttagtacttttgaagaagctgcgctgtgcacctttttgttaaataaagaaatgtatctaaagttgcgtagtgatgtgctattacctcttacgcaatataatagatacttagctctttataataagtacaagtattttagtggagcaatggatacaactagctacagagaagctgcttgttgtcatctcgcaaaggctctcaatgacttcagtaactcaggttctgatgttctttaccaaccaccacaaacctctatcacctcagctgttttgcagagtggttttagaaaaatggcattcccatctggtaaagttgagggttgtatggtacaagtaacttgtggtacaactacacttaacggtctttggcttgatgacgtagtttactgtccaagacatgtgatctgcacctctgaagacatgcttaaccctaattatgaagatttactcattcgtaagtctaatcataatttcttggtacaggctggtaatgttcaactcagggttattggacattctatgcaaaattgtgtacttaagcttaaggttgatacagccaatcctaagacacctaagtataagtttgttcgcattcaaccaggacagactttttcagtgttagcttgttacaatggttcaccatctggtgtttaccaatgtgctatgaggcccaatttcactattaagggttcattccttaatggttcatgtggtagtgttggttttaacatagattatgactgtgtctctttttgttacatgcaccatatggaattaccaactggagttcatgctggcacagacttagaaggtaacttttatggaccttttgttgacaggcaaacagcacaagcagctggtacggacacaactattacagttaatgttttagcttggttgtacgctgctgttataaatggagacaggtggtttctcaatcgatttaccacaactcttaatgactttaaccttgtggctatgaagtacaattatgaacctctaacacaagaccatgttgacatactaggacctctttctgctcaaactggaattgccgttttagatatgtgtgcttcattaaaagaattactgcaaaatggtatgaatggacgtaccatattgggtagtgctttattagaagatgaatttacaccttttgatgttgttagacaatgctcaggtgttactttccaaagtgcagtgaaaagaacaatcaagggtacacaccactggttgttactcacaattttgacttcacttttagttttagtccagagtactcaatggtctttgttcttttttttgtatgaaaatgcctttttaccttttgctatgggtattattgctatgtctgcttttgcaatgatgtttgtcaaacataagcatgcatttctctgtttgtttttgttaccttctcttgccactgtagcttattttaatatggtctatatgcctgctagttgggtgatgcgtattatgacatggttggatatggttgatactagtttgtctggttttaagctaaaagactgtgttatgtatgcatcagctgtagtgttactaatccttatgacagcaagaactgtgtatgatgatggtgctaggagagtgtggacacttatgaatgtcttgacactcgtttataaagtttattatggtaatgctttagatcaagccatttccatgtgggctcttataatctctgttacttctaactactcaggtgtagttacaactgtcatgtttttggccagaggtattgtttttatgtgtgttgagtattgccctattttcttcataactggtaatacacttcagtgtataatgctagtttattgtttcttaggctatttttgtacttgttactttggcctcttttgtttactcaaccgctactttagactgactcttggtgtttatgattacttagtttctacacaggagtttagatatatgaattcacagggactactcccacccaagaatagcatagatgccttcaaactcaacattaaattgttgggtgttggtggcaaaccttgtatcaaagtagccactgtacagtctaaaatgtcagatgtaaagtgcacatcagtagtcttactctcagttttgcaacaactcagagtagaatcatcatctaaattgtgggctcaatgtgtccagttacacaatgacattctcttagctaaagatactactgaagcctttgaaaaaatggtttcactactttctgttttgctttccatgcagggtgctgtagacataaacaagctttgtgaagaaatgctggacaacagggcaaccttacaagctatagcctcagagtttagttcccttccatcatatgcagcttttgctactgctcaagaagcttatgagcaggctgttgctaatggtgattctgaagttgttcttaaaaagttgaagaagtctttgaatgtggctaaatctgaatttgaccgtgatgcagccatgcaacgtaagttggaaaagatggctgatcaagctatgacccaaatgtataaacaggctagatctgaggacaagagggcaaaagttactagtgctatgcagacaatgcttttcactatgcttagaaagttggataatgatgcactcaacaacattatcaacaatgcaagagatggttgtgttcccttgaacataatacctcttacaacagcagccaaactaatggttgtcataccagactataacacatataaaaatacgtgtgatggtacaacatttacttatgcatcagcattgtgggaaatccaacaggttgtagatgcagatagtaaaattgttcaacttagtgaaattagtatggacaattcacctaatttagcatggcctcttattgtaacagctttaagggccaattctgctgtcaaattacagaataatgagcttagtcctgttgcactacgacagatgtcttgtgctgccggtactacacaaactgcttgcactgatgacaatgcgttagcttactacaacacaacaaagggaggtaggtttgtacttgcactgttatccgatttacaggatttgaaatgggctagattccctaagagtgatggaactggtactatctatacagaactggaaccaccttgtaggtttgttacagacacacctaaaggtcctaaagtgaagtatttatactttattaaaggattaaacaacctaaatagaggtatggtacttggtagtttagctgccacagtacgtctacaagctggtaatgcaacagaagtgcctgccaattcaactgtattatctttctgtgcttttgctgtagatgctgctaaagcttacaaagattatctagctagtgggggacaaccaatcactaattgtgttaagatgttgtgtacacacactggtactggtcaggcaataacagttacaccggaagccaatatggatcaagaatcctttggtggtgcatcgtgttgtctgtactgccgttgccacatagatcatccaaatcctaaaggattttgtgacttaaaaggtaagtatgtacaaatacctacaacttgtgctaatgaccctgtgggttttacacttaaaaacacagtctgtaccgtctgcggtatgtggaaaggttatggctgtagttgtgatcaactccgcgaacccatgcttcagtcagctgatgcacaatcgtttttaaacgggtttgcggtgtaagtgcagcccgtcttacaccgtgcggcacaggcactagtactgatgtcgtatacagggcttttgacatctacaatgataaagtagctggttttgctaaattcctaaaaactaattgttgtcgcttccaagaaaaggacgaagatgacaatttaattgattcttactttgtagttaagagacacactttctctaactaccaacatgaagaaacaatttataatttacttaaggattgtccagctgttgctaaacatgacttctttaagtttagaatagacggtgacatggtaccacatatatcacgtcaacgtcttactaaatacacaatggcagacctcgtctatgctttaaggcattttgatgaaggtaattgtgacacattaaaagaaatacttgtcacatacaattgttgtgatgatgattatttcaataaaaaggactggtatgattttgtagaaaacccagatatattacgcgtatacgccaacttaggtgaacgtgtacgccaagctttgttaaaaacagtacaattctgtgatgccatgcgaaatgctggtattgttggtgtactgacattagataatcaagatctcaatggtaactggtatgatttcggtgatttcatacaaaccacgccaggtagtggagttcctgttgtagattcttattattcattgttaatgcctatattaaccttgaccagggctttaactgcagagtcacatgttgacactgacttaacaaagccttacattaagtgggatttgttaaaatatgacttcacggaagagaggttaaaactctttgaccgttattttaaatattgggatcagacataccacccaaattgtgttaactgtttggatgacagatgcattctgcattgtgcaaactttaatgttttattctctacagtgttcccacctacaagttttggaccactagtgagaaaaatatttgttgatggtgttccatttgtagtttcaactggataccacttcagagagctaggtgttgtacataatcaggatgtaaacttacatagctctagacttagttttaaggaattacttgtgtatgctgctgaccctgctatgcacgctgcttctggtaatctattactagataaacgcactacgtgcttttcagtagctgcacttactaacaatgttgcttttcaaactgtcaaacccggtaattttaacaaagacttctatgactttgctgtgtctaagggtttctttaaggaaggaagttctgttgaattaaaacacttcttctttgctcaggatggtaatgctgctatcagcgattatgactactatcgttataatctaccaacaatgtgtgatatcagacaactactatttgtagttgaagttgttgataagtactttgattgttacgatggtggctgtattaatgctaaccaagtcatcgtcaacaacctagacaaatcagctggttttccatttaataaatggggtaaggctagactttattatgattcaatgagttatgaggatcaagatgcacttttcgcatatacaaaacgtaatgtcatccctactataactcaaatgaatcttaagtatgccattagtgcaaagaatagagctcgcaccgtagctggtgtctctatctgtagtactatgaccaatagacagtttcatcaaaaattattgaaatcaatagccgccactagaggagctactgtagtaattggaacaagcaaattctatggtggttggcacaacatgttaaaaactgtttatagtgatgtagaaaaccctcaccttatgggttgggattatcctaaatgtgatagagccatgcctaacatgcttagaattatggcctcacttgttcttgctcgcaaacatacaacgtgttgtagcttgtcacaccgtttctatagattagctaatgagtgtgctcaagtattgagtgaaatggtcatgtgtggcggttcactatatgttaaaccaggtggaacctcatcaggagatgccacaactgcttatgctaatagtgtttttaacatttgtcaagctgtcacggccaatgttaatgcacttttatctactgatggtaacaaaattgccgataagtatgtccgcaatttacaacacagactttatgagtgtctctatagaaatagagatgttgacacagactttgtgaatgagttttacgcatatttgcgtaaacatttctcaatgatgatactctctgacgatgctgttgtgtgtttcaatagcacttatgcatctcaaggtctagtggctagcataaagaactttaagtcagttctttattatcaaaacaatgtttttatgtctgaagcaaaatgttggactgagactgaccttactaaaggacctcatgaattttgctctcaacatacaatgctagttaaacagggtgatgattatgtgtaccttccttacccagatccatcaagaatcctaggggccggctgttttgtagatgatatcgtaaaaacagatggtacacttatgattgaacggttcgtgtctttagctatagatgcttacccacttactaaacatcctaatcaggagtatgctgatgtctttcatttgtacttacaatacataagaaagctacatgatgagttaacaggacacatgttagacatgtattctgttatgcttactaatgataacacttcaaggtattgggaacctgagttttatgaggctatgtacacaccgcatacagtcttacaggctgttggggcttgtgttctttgcaattcacagacttcattaagatgtggtgcttgcatacgtagaccattcttatgttgtaaatgctgttacgaccatgtcatatcaacatcacataaattagtcttgtctgttaatccgtatgtttgcaatgctccaggttgtgatgtcacagatgtgactcaactttacttaggaggtatgagctattattgtaaatcacataaaccacccattagttttccattgtgtgctaatggacaagtttttggtttatataaaaatacatgtgttggtagcgataatgttactgactttaatgcaattgcaacatgtgactggacaaatgctggtgattacattttagctaacacctgtactgaaagactcaagctttttgcagcagaaacgctcaaagctactgaggagacatttaaactgtcttatggtattgctactgtacgtgaagtgctgtctgacagagaattacatctttcatgggaagttggtaaacctagaccaccacttaaccgaaattatgtctttactggttatcgtgtaactaaaaacagtaaagtacaaataggagagtacacctttgaaaaaggtgactatggtgatgctgttgtttaccgaggtacaacaacttacaaattaaatgttggtgattattttgtgctgacatcacatacagtaatgccattaagtgcacctacactagtgccacaagagcactatgttagaattactggcttatacccaacactcaatatctcagatgagttttctagcaatgttgcaaattatcaaaaggttggtatgcaaaagtattctacactccagggaccacctggtactggtaagagtcattttgctattggcctagctctctactacccttctgctcgcatagtgtatacagcttgctctcatgccgctgttgatgcactatgtgagaaggcattaaaatatttgcctatagataaatgtagtagaattatacctgcacgtgctcgtgtagagtgttttgataaattcaaagtgaattcaacattagaacagtatgtcttttgtactgtaaatgcattgcctgagacgacagcagatatagttgtctttgatgaaatttcaatggccacaaattatgatttgagtgttgtcaatgccagattacgtgctaagcactatgtgtacattggcgaccctgctcaattacctgcaccacgcacattgctaactaagggcacactagaaccagaatatttcaattcagtgtgtagacttatgaaaactataggtccagacatgttcctcggaacttgtcggcgttgtcctgctgaaattgttgacactgtgagtgctttggtttatgataataagcttaaagcacataaagacaaatcagctcaatgctttaaaatgttttataagggtgttatcacgcatgatgtttcatctgcaattaacaggccacaaataggcgtggtaagagaattccttacacgtaaccctgcttggagaaaagctgtctttatttcaccttataattcacagaatgctgtagcctcaaagattttgggactaccaactcaaactgttgattcatcacagggctcagaatatgactatgtcatattcactcaaaccactgaaacagctcactcttgtaatgtaaacagatttaatgttgctattaccagagcaaaagtaggcatactttgcataatgtctgatagagacctttatgacaagttgcaatttacaagtcttgaaattccacgtaggaatgtggcaactttacaagctgaaaatgtaacaggactctttaaagattgtagtaaggtaatcactgggttacatcctacacaggcacctacacacctcagtgttgacactaaattcaaaactgaaggtttatgtgttgacatacctggcatacctaaggacatgacctatagaagactcatctctatgatgggttttaaaatgaattatcaagttaatggttaccctaacatgtttatcacccgcgaagaagctataagacatgtacgtgcatggattggcttcgatgtcgaggggtgtcatgctactagagaagctgttggtaccaatttacctttacagctaggtttttctacaggtgttaacctagttgctgtacctacaggttatgttgatacacctaataatacagatttttccagagttagtgctaaaccaccgcctggagatcaatttaaacacctcataccacttatgtacaaaggacttccttggaatgtagtgcgtataaagattgtacaaatgttaagtgacacacttaaaaatctctctgacagagtcgtatttgtcttatgggcacatggctttgagttgacatctatgaagtattttgtgaaaataggacctgagcgcacctgttgtctatgtgatagacgtgccacatgcttttccactgcttcagacacttatgcctgttggcatcattctattggatttgattacgtctataatccgtttatgattgatgttcaacaatggggttttacaggtaacctacaaagcaaccatgatctgtattgtcaagtccatggtaatgcacatgtagctagttgtgatgcaatcatgactaggtgtctagctgtccacgagtgctttgttaagcgtgttgactggactattgaatatcctataattggtgatgaactgaagattaatgcggcttgtagaaaggttcaacacatggttgttaaagctgcattattagcagacaaattcccagttcttcacgacattggtaaccctaaagctattaagtgtgtacctcaagctgatgtagaatggaagttctatgatgcacagccttgtagtgacaaagcttataaaatagaagaattattctattcttatgccacacattctgacaaattcacagatggtgtatgcctattttggaattgcaatgtcgatagatatcctgctaattccattgtttgtagatttgacactagagtgctatctaaccttaacttgcctggttgtgatggtggcagtttgtatgtaaataaacatgcattccacacaccagcttttgataaaagtgcttttgttaatttaaaacaattaccatttttctattactctgacagtccatgtgagtctcatggaaaacaagtagtgtcagatatagattatgtaccactaaagtctgctacgtgtataacacgttgcaatttaggtggtgctgtctgtagacatcatgctaatgagtacagattgtatctcgatgcttataacatgatgatctcagctggctttagcttgtgggtttacaaacaatttgatacttataacctctggaacacttttacaagacttcagagtttagaaaatgtggcttttaatgttgtaaataagggacactttgatggacaacagggtgaagtaccagtttctatcattaataacactgtttacacaaaagttgatggtgttgatgtagaattgtttgaaaataaaacaacattacctgttaatgtagcatttgagctttgggctaagcgcaacattaaaccagtaccagaggtgaaaatactcaataatttgggtgtggacattgctgctaatactgtgatctgggactacaaaagagatgctccagcacatatatctactattggtgtttgttctatgactgacatagccaagaaaccaactgaaacgatttgtgcaccactcactgtcttttttgatggtagagttgatggtcaagtagacttatttagaaatgcccgtaatggtgttcttattacagaaggtagtgttaaaggtttacaaccatctgtaggtcccaaacaagctagtcttaatggagtcacattaattggagaagccgtaaaaacacagttcaattattataagaaagttgatggtgttgtccaacaattacctgaaacttactttactcagagtagaaatttacaagaatttaaacccaggagtcaaatggaaattgatttcttagaattagctatggatgaattcattgaacggtataaattagaaggctatgccttcgaacatatcgtttatggagattttagtcatagtcagttaggtggtttacatctactgattggactagctaaacgttttaaggaatcaccttttgaattagaagattttattcctatggacagtacagttaaaaactatttcataacagatgcgcaaacaggttcatctaagtgtgtgtgttctgttattgatttattacttgatgattttgttgaaataataaaatcccaagatttatctgtagtttctaaggttgtcaaagtgactattgactatacagaaatttcatttatgctttggtgtaaagatggccatgtagaaacattttacccaaaattacaatctagtcaagcgtggcaaccgggtgttgctatgcctaatctttacaaaatgcaaagaatgctattagaaaagtgtgaccttcaaaattatggtgatagtgcaacattacctaaaggcataatgatgaatgtcgcaaaatatactcaactgtgtcaatatttaaacacattaacattagctgtaccctataatatgagagttatacattttggtgctggttctgataaaggagttgcaccaggtacagctgttttaagacagtggttgcctacgggtacgctgcttgtcgattcagatcttaatgactttgtctctgatgcagattcaactttgattggtgattgtgcaactgtacatacagctaataaatgggatctcattattagtgatatgtacgaccctaagactaaaaatgttacaaaagaaaatgactctaaagagggttttttcacttacatttgtgggtttatacaacaaaagctagctcttggaggttccgtggctataaagataacagaacattcttggaatgctgatctttataagctcatgggacacttcgcatggtggacagcctttgttactaatgtgaatgcgtcatcatctgaagcatttttaattggatgtaattatcttggcaaaccacgcgaacaaatagatggttatgtcatgcatgcaaattacatattttggaggaatacaaatccaattcagttgtcttcctattctttatttgacatgagtaaatttccccttaaattaaggggtactgctgttatgtctttaaaagaaggtcaaatcaatgatatgattttatctcttcttagtaaaggtagacttataattagagaaaacaacagagttgttatttctagtgatgttcttgttaacaactaaacgaacaatgtttgtttttcttgttttattgccactagtctctagtcagtgtgttaatcttacaaccagaactcaattaccccctgcatacactaattctttcacacgtggtgtttattaccctgacaaagttttcagatcctcagttttacattcaactcaggacttgttcttacctttcttttccaatgttacttggttccatgctatacatgtctctgggaccaatggtactaagaggtttgataaccctgtcctaccatttaatgatggtgtttattttgcttccactgagaagtctaacataataagaggctggatttttggtactactttagattcgaagacccagtccctacttattgttaataacgctactaatgttgttattaaagtctgtgaatttcaattttgtaatgatccatttttgggtgtttattaccacaaaaacaacaaaagttggatggaaagtgagttcagagtttattctagtgcgaataattgcacttttgaatatgtctctcagccttttcttatggaccttgaaggaaaacagggtaatttcaaaaatcttagggaatttgtgtttaagaatattgatggttattttaaaatatattctaagcacacgcctattaatttagtgcgtgatctccctcagggtttttcggctttagaaccattggtagatttgccaataggtattaacatcactaggtttcaaactttacttgctttacatagaagttatttgactcctggtgattcttcttcaggttggacagctggtgctgcagcttattatgtgggttatcttcaacctaggacttttctattaaaatataatgaaaatggaaccattacagatgctgtagactgtgcacttgaccctctctcagaaacaaagtgtacgttgaaatccttcactgtagaaaaaggaatctatcaaacttctaactttagagtccaaccaacagaatctattgttagatttcctaatattacaaacttgtgcccttttggtgaagtttttaacgccaccagatttgcatctgtttatgcttggaacaggaagagaatcagcaactgtgttgctgattattctgtcctatataattccgcatcattttccacttttaagtgttatggagtgtctcctactaaattaaatgatctctgctttactaatgtctatgcagattcatttgtaattagaggtgatgaagtcagacaaatcgctccagggcaaactggaaagattgctgattataattataaattaccagatgattttacaggctgcgttatagcttggaattctaacaatcttgattctaaggttggtggtaattataattacctgtatagattgtttaggaagtctaatctcaaaccttttgagagagatatttcaactgaaatctatcaggccggtagcacaccttgtaatggtgttgaaggttttaattgttactttcctttacaatcatatggtttccaacccactaatggtgttggttaccaaccatacagagtagtagtactttcttttgaacttctacatgcaccagcaactgtttgtggacctaaaaagtctactaatttggttaaaaacaaatgtgtcaatttcaacttcaatggtttaacaggcacaggtgttcttactgagtctaacaaaaagtttctgcctttccaacaatttggcagagacattgctgacactactgatgctgtccgtgatccacagacacttgagattcttgacattacaccatgttcttttggtggtgtcagtgttataacaccaggaacaaatacttctaaccaggttgctgttctttatcaggatgttaactgcacagaagtccctgttgctattcatgcagatcaacttactcctacttggcgtgtttattctacaggttctaatgtttttcaaacacgtgcaggctgtttaataggggctgaacatgtcaacaactcatatgagtgtgacatacccattggtgcaggtatatgcgctagttatcagactcagactaattctcctcggcgggcacgtagtgtagctagtcaatccatcattgcctacactatgtcacttggtgcagaaaattcagttgcttactctaataactctattgccatacccacaaattttactattagtgttaccacagaaattctaccagtgtctatgaccaagacatcagtagattgtacaatgtacatttgtggtgattcaactgaatgcagcaatcttttgttgcaatatggcagtttttgtacacaattaaaccgtgctttaactggaatagctgttgaacaagacaaaaacacccaagaagtttttgcacaagtcaaacaaatttacaaaacaccaccaattaaagattttggtggttttaatttttcacaaatattaccagatccatcaaaaccaagcaagaggtcatttattgaagatctacttttcaacaaagtgacacttgcagatgctggcttcatcaaacaatatggtgattgccttggtgatattgctgctagagacctcatttgtgcacaaaagtttaacggccttactgttttgccacctttgctcacagatgaaatgattgctcaatacacttctgcactgttagcgggtacaatcacttctggttggacctttggtgcaggtgctgcattacaaataccatttgctatgcaaatggcttataggtttaatggtattggagttacacagaatgttctctatgagaaccaaaaattgattgccaaccaatttaatagtgctattggcaaaattcaagactcactttcttccacagcaagtgcacttggaaaacttcaagatgtggtcaaccaaaatgcacaagctttaaacacgcttgttaaacaacttagctccaattttggtgcaatttcaagtgttttaaatgatatcctttcacgtcttgacaaagttgaggctgaagtgcaaattgataggttgatcacaggcagacttcaaagtttgcagacatatgtgactcaacaattaattagagctgcagaaatcagagcttctgctaatcttgctgctactaaaatgtcagagtgtgtacttggacaatcaaaaagagttgatttttgtggaaagggctatcatcttatgtccttccctcagtcagcacctcatggtgtagtcttcttgcatgtgacttatgtccctgcacaagaaaagaacttcacaactgctcctgccatttgtcatgatggaaaagcacactttcctcgtgaaggtgtctttgtttcaaatggcacacactggtttgtaacacaaaggaatttttatgaaccacaaatcattactacagacaacacatttgtgtctggtaactgtgatgttgtaataggaattgtcaacaacacagtttatgatcctttgcaacctgaattagactcattcaaggaggagttagataaatattttaagaatcatacatcaccagatgttgatttaggtgacatctctggcattaatgcttcagttgtaaacattcaaaaagaaattgaccgcctcaatgaggttgccaagaatttaaatgaatctctcatcgatctccaagaacttggaaagtatgagcagtatataaaatggccatggtacatttggctaggttttatagctggcttgattgccatagtaatggtgacaattatgctttgctgtatgaccagttgctgtagttgtctcaagggctgttgttcttgtggatcctgctgcaaatttgatgaagacgactctgagccagtgctcaaaggagtcaaattacattacacataaacgaacttatggatttgtttatgagaatcttcacaattggaactgtaactttgaagcaaggtgaaatcaaggatgctactccttcagattttgttcgcgctactgcaacgataccgatacaagcctcactccctttcggatggcttattgttggcgttgcacttcttgctgtttttcagagcgcttccaaaatcataaccctcaaaaagagatggcaactagcactctccaagggtgttcactttgtttgcaacttgctgttgttgtttgtaacagtttactcacaccttttgctcgttgctgctggccttgaagccccttttctctatctttatgctttagtctacttcttgcagagtataaactttgtaagaataataatgaggctttggctttgctggaaatgccgttccaaaaacccattactttatgatgccaactattttctttgctggcatactaattgttacgactattgtataccttacaatagtgtaacttcttcaattgtcattacttcaggtgatggcacaacaagtcctatttctgaacatgactaccagattggtggttatactgaaaaatgggaatctggagtaaaagactgtgttgtattacacagttacttcacttcagactattaccagctgtactcaactcaattgagtacagacactggtgttgaacatgttaccttcttcatctacaataaaattgttgatgagcctgaagaacatgtccaaattcacacaatcgacggttcatccggagttgttaatccagtaatggaaccaatttatgatgaaccgacgacgactactagcgtgcctttgtaagcacaagctgatgagtacgaacttatgtactcattcgtttcggaagagacaggtacgttaatagttaatagcgtacttctttttcttgctttcgtggtattcttgctagttacactagccatccttactgcgcttcgattgtgtgcgtactgctgcaatattgttaacgtgagtcttgtaaaaccttctttttacgtttactctcgtgttaaaaatctgaattcttctagagttcctgatcttctggtctaaacgaactaaatattatattagtttttctgtttggaactttaattttagccatggcagattccaacggtactattaccgttgaagagcttaaaaagctccttgaacaatggaacctagtaataggtttcctattccttacatggatttgtcttctacaatttgcctatgccaacaggaataggtttttgtatataattaagttaattttcctctggctgttatggccagtaactttagcttgttttgtgcttgctgctgtttacagaataaattggatcaccggtggaattgctatcgcaatggcttgtcttgtaggcttgatgtggctcagctacttcattgcttctttcagactgtttgcgcgtacgcgttccatgtggtcattcaatccagaaactaacattcttctcaacgtgccactccatggcactattctgaccagaccgcttctagaaagtgaactcgtaatcggagctgtgatccttcgtggacatcttcgtattgctggacaccatctaggacgctgtgacatcaaggacctgcctaaagaaatcactgttgctacatcacgaacgctttcttattacaaattgggagcttcgcagcgtgtagcaggtgactcaggttttgctgcatacagtcgctacaggattggcaactataaattaaacacagaccattccagtagcagtgacaatattgctttgcttgtacagtaagtgacaacagatgtttcatctcgttgactttcaggttactatagcagagatattactaattattatgaggacttttaaagtttccatttggaatcttgattacatcataaacctcataattaaaaatttatctaagtcactaactgagaataaatattctcaattagatgaagagcaaccaatggagattgattaaacgaacatgaaaattattcttttcttggcactgataacactcgctacttgtgagctttatcactaccaagagtgtgttagaggtacaacagtacttttaaaagaaccttgctcttctggaacatacgagggcaattcaccatttcatcctctagctgataacaaatttgcactgacttgctttagcactcaatttgcttttgcttgtcctgacggcgtaaaacacgtctatcagttacgtgccagatcagtttcacctaaactgttcatcagacaagaggaagttcaagaactttactctccaatttttcttattgttgcggcaatagtgtttataacactttgcttcacactcaaaagaaagacagaatgattgaactttcattaattgacttctatttgtgctttttagcctttctgctattccttgttttaattatgcttattatcttttggttctcacttgaactgcaagatcataatgaaacttgtcacgcctaaacgaacatgaaatttcttgttttcttaggaatcatcacaactgtagctgcatttcaccaagaatgtagtttacagtcatgtactcaacatcaaccatatgtagttgatgacccgtgtcctattcacttctattctaaatggtatattagagtaggagctagaaaatcagcacctttaattgaattgtgcgtggatgaggctggttctaaatcacccattcagtacatcgatatcggtaattatacagtttcctgtttaccttttacaattaattgccaggaacctaaattgggtagtcttgtagtgcgttgttcgttctatgaagactttttagagtatcatgacgttcgtgttgttttagatttcatctaaacgaacaaactaaaatgtctgataatggaccccaaaatcagcgaaatgcaccccgcattacgtttggtggaccctcagattcaactggcagtaaccagaatggagaacgcagtggggcgcgatcaaaacaacgtcggccccaaggtttacccaataatactgcgtcttggttcaccgctctcactcaacatggcaaggaagaccttaaattccctcgaggacaaggcgttccaattaacaccaatagcagtccagatgaccaaattggctactaccgaagagctaccagacgaattcgtggtggtgacggtaaaatgaaagatctcagtccaagatggtatttctactacctaggaactgggccagaagctggacttccctatggtgctaacaaagacggcatcatatgggttgcaactgagggagccttgaatacaccaaaagatcacattggcacccgcaatcctgctaacaatgctgcaatcgtgctacaacttcctcaaggaacaacattgccaaaaggcttctacgcagaagggagcagaggcggcagtcaagcctcttctcgttcctcatcacgtagtcgcaacagttcaagaaattcaactccaggcagcagtaggggaacttctcctgctagaatggctggcaatggcggtgatgctgctcttgctttgctgctgcttgacagattgaaccagcttgagagcaaaatgtctggtaaaggccaacaacaacaaggccaaactgtcactaagaaatctgctgctgaggcttctaagaagcctcggcaaaaacgtactgccactaaagcatacaatgtaacacaagctttcggcagacgtggtccagaacaaacccaaggaaattttggggaccaggaactaatcagacaaggaactgattacaaacattggccgcaaattgcacaatttgcccccagcgcttcagcgttcttcggaatgtcgcgcattggcatggaagtcacaccttcgggaacgtggttgacctacacaggtgccatcaaattggatgacaaagatccaaatttcaaagatcaagtcattttgctgaataagcatattgacgcatacaaaacattcccaccaacagagcctaaaaaggacaaaaagaagaaggctgatgaaactcaagccttaccgcagagacagaagaaacagcaaactgtgactcttcttcctgctgcagatttggatgatttctccaaacaattgcaacaatccatgagcagtgctgactcaactcaggcctaaactcatgcagaccacacaaggcagatgggctatataaacgttttcgcttttccgtttacgatatatagtctactcttgtgcagaatgaattctcgtaactacatagcacaagtagatgtagttaactttaatctcacatagcaatctttaatcagtgtgtaacattagggaggacttgaaagagccaccacattttcaccgaggccacgcggagtacgatcgagtgtacagtgaacaatgctagggagagctgcctatatggaagagccctaatgtgtaaaattaattttagtagtgctatccccatgtgattttaatagcttcttaggagaatgac

SEQ ID NO: 6 - DNA, 29856 bp, SARS-CoV-2
ttataccttcccaggtaacaaaccaaccaactttcgatctcttgtagatctgttctctaaacgaactttaaaatctgtgtggctgtcactcggctgcatgcttagtgcactcacgcagtataattaataactaattactgtcgttgacaggacacgagtaactcgtctatcttctgcaggctgcttacggtttcgtccgtgttgcagccgatcatcagcacatctaggttttgtccgggtgtgaccgaaaggtaagatggagagccttgtccctggtttcaacgagaaaacacacgtccaactcagtttgcctgttttacaggttcgcgacgtgctcgtacgtggctttggagactccgtggaggaggtcttatcagaggcacgtcaacatcttaaagatggcacttgtggcttagtagaagttgaaaaaggcgttttgcctcaacttgaacagccctatgtgttcatcaaacgttcggatgctcgaactgcacctcatggtcatgttatggttgagctggtagcagaactcgaaggcattcagtacggtcgtagtggtgagacacttggtgtccttgtccctcatgtgggcgaaataccagtggcttaccgcaaggttcttcttcgtaagaacggtaataaaggagctggtggccatagttacggcgccgatctaaagtcatttgacttaggcgacgagcttggcactgatccttatgaagattttcaagaaaactggaacactaaacatagcagtggtgttacccgtgaactcatgcgtgagcttaacggaggggcatacactcgctatgtcgataacaacttctgtggccctgatggctaccctcttgagtgcattaaagaccttctagcacgtgctggtaaagcttcatgcactttgtccgaacaactggactttattgacactaagaggggtgtatactgctgccgtgaacatgagcatgaaattgcttggtacacggaacgttctgaaaagagctatgaattgcagacaccttttgaaattaaattggcaaagaaatttgacaccttcaatggggaatgtccaaattttgtatttcccttaaattccataatcaagactattcaaccaagggttgaaaagaaaaagcttgatggctttatgggtagaattcgatctgtctatccagttgcgtcaccaaatgaatgcaaccaaatgtgcctttcaactctcatgaagtgtgatcattgtggtgaaacttcatggcagacgggcgattttgttaaagccacttgcgaattttgtggcactgagaatttgactaaagaaggtgccactacttgtggttacttaccccaaaatgctgttgttaaaatttattgtccagcatgtcacaattcagaagtaggacctgagcatagtcttgccgaataccataatgaatctggcttgaaaaccattcttcgtaagggtggtcgcactattgcctttggaggctgtgtgttctcttatgttggttgccataacaagtgtgcctattgggttccacgtgctagcgctaacataggttgtaaccatacaggtgttgttggagaaggttccgaaggtcttaatgacaaccttcttgaaatactccaaaaagagaaagtcaacatcaatattgttggtgactttaaacttaatgaagagatcgccattattttggcatctttttctgcttccacaagtgcttttgtggaaactgtgaaaggtttggattataaagcattcaaacaaattgttgaatcctgtggtaattttaaagttacaaaaggaaaagctaaaaaaggtgcctggaatattggtgaacagaaatcaatactgagtcctctttatgcatttgcatcagaggctgctcgtgttgtacgatcaattttctcccgcactcttgaaactgctcaaaattctgtgcgtgttttacagaaggccgctataacaatactagatggaatttcacagtattcactgagactcattgatgctatgatgttcacatctgatttggctactaacaatctagttgtaatggcctacattacaggtggtgttgttcagttgacttcgcagtggctaactaacatctttggcactgtttatgaaaaactcaaacccgtccttgattggcttgaagagaagtttaaggaaggtgtagagtttcttagagacggttgggaaattgttaaatttatctcaacctgtgcttgtgaaattgtcggtggacaaattgtcacctgtgcaaaggaaattaaggagagtgttcagacattctttaagcttgtaaataaatttttggctttgtgtgctgactctatcattattggtggagctaaacttaaagccttgaatttaggtgaaacatttgtcacgcactcaaagggattgtacagaaagtgtgttaaatccagagaagaaactggcctactcatgcctctaaaagccccaaaagaaattatcttcttagagggagaaacacttcccacagaagtgttaacagaggaagttgtcttgaaaactggtgatttacaaccattagaacaacctactagtgaagctgttgaagctccattggttggtacaccagtttgtattaacgggcttatgttgctcgaaatcaaagacacagaaaagtactgtgcccttgcacctaatatgatggtaacaaacaataccttcacactcaaaggcggtgcaccaacaaaggttacttttggtgatgacactgtgatagaagtgcaaggttacaagagtgtgaatatcacttttgaacttgatgaaaggattgataaagtacttaatgagaagtgctctgcctatacagttgaactcggtacagaagtaaatgagttcgcctgtgttgtggcagatgctgtcataaaaactttgcaaccagtatctgaattacttacaccactgggcattgatttagatgagtggagtatggctacatactacttatttgatgagtctggtgagtttaaattggcttcacatatgtattgttctttttaccctccagatgaggatgaagaagaaggtgattgtgaagaagaagagtttgagccatcaactcaatatgagtatggtactgaagatgattaccaaggtaaacctttggaatttggtgccacttctgctgctcttcaacctgaagaagagcaagaagaagattggttagatgatgatagtcaacaaactgttggtcaacaagacggcagtgaggacaatcagacaactactattcaaacaattgttgaggttcaacctcaattagagatggaacttacaccagttgttcagactattgaagtgaatagttttagtggttatttaaaacttactgacaatgtatacattaaaaatgcagacattgtggaagaagctaaaaaggtaaaaccaacagtggttgttaatgcagccaatgtttaccttaaacatggaggaggtgttgcaggagccttaaataaggctactaacaatgccatgcaagttgaatctgatgattacatagctactaatggaccacttaaagtgggtggtagttgtgttttaagcggacacaatcttgctaaacactgtcttcatgttgtcggcccaaatgttaacaaaggtgaagacattcaacttcttaagagtgcttatgaaaattttaatcagcacgaagttctacttgcaccattattatcagctggtatttttggtgctgaccctatacattctttaagagtttgtgtagatactgttcgcacaaatgtctacttagctgtctttgataaaaatctctatgacaaacttgtttcaagctttttggaaatgaagagtgaaaagcaagttgaacaaaagatcgctgagattcctaaagaggaagttaagccatttataactgaaagtaaaccttcagttgaacagagaaaacaagatgataagaaaatcaaagcttgtgttgaagaagttacaacaactctggaagaaactaagttcctcacagaaaacttgttactttatattgacattaatggcaatcttcatccagattctgccactcttgttagtgacattgacatcactttcttaaagaaagatgctccatatatagtgggtgatgttgttcaagagggtgttttaactgctgtggttatacctactaaaaaggctggtggcactactgaaatgctagcgaaagctttgagaaaagtgccaacagacaattatataaccacttacccgggtcagggtttaaatggttacactgtagaggaggcaaagacagtgcttaaaaagtgtaaaagtgccttttacattctaccatctattatctctaatgagaagcaagaaattcttggaactgtttcttggaatttgcgagaaatgcttgcacatgcagaagaaacacgcaaattaatgcctgtctgtgtggaaactaaagccatagtttcaactatacagcgtaaatataagggtattaaaatacaagagggtgtggttgattatggtgctagattttacttttacaccagtaaaacaactgtagcgtcacttatcaacacacttaacgatctaaatgaaactcttgttacaatgccacttggctatgtaacacatggcttaaatttggaagaagctgctcggtatatgagatctctcaaagtgccagctacagtttctgtttcttcacctgatgctgttacagcgtataatggttatcttacttcttcttctaaaacacctgaagaacattttattgaaaccatctcacttgctggttcctataaagattggtcctattctggacaatctacacaactaggtatagaatttcttaagagaggtgataaaagtgtatattacactagtaatcctaccacattccacctagatggtgaagttatcacctttgacaatcttaagacacttctttctttgagagaagtgaggactattaaggtgtttacaacagtagacaacattaacctccacacgcaagttgtggacatgtcaatgacatatggacaacagtttggtccaacttatttggatggagctgatgttactaaaataaaacctcataattcacatgaaggtaaaacattttatgttttacctaatgatgacactctacgtgttgaggcttttgagtactaccacacaactgatcctagttttctgggtaggtacatgtcagcattaaatcacactaaaaagtggaaatacccacaagttaatggtttaacttctattaaatgggcagataacaactgttatcttgccactgcattgttaacactccaacaaatagagttgaagtttaatccacctgctctacaagatgcttattacagagcaagggctggtgaagctgctaacttttgtgcacttatcttagcctactgtaataagacagtaggtgagttaggtgatgttagagaaacaatgagttacttgtttcaacatgccaatttagattcttgcaaaagagtcttgaacgtggtgtgtaaaacttgtggacaacagcagacaacccttaagggtgtagaagctgttatgtacatgggcacactttcttatgaacaatttaagaaaggtgttcagataccttgtacgtgtggtaaacaagctacaaaatatctagtacaacaggagtcaccttttgttatgatgtcagcaccacctgctcagtatgaacttaagcatggtacatttacttgtgctagtgagtacactggtaattaccagtgtggtcactataaacatataacttctaaagaaactttgtattgcatagacggtgctttacttacaaagtcctcagaatacaaaggtcctattacggatgttttctacaaagaaaacagttacacaacaaccataaaaccagttacttataaattggatggtgttgtttgtacagaaattgaccctaagttggacaattattataagaaagacaattcttatttcacagagcaaccaattgatcttgtaccaaaccaaccatatccaaacgcaagcttcgataattttaagtttgtatgtgataatatcaaatttgctgatgatttaaaccagttaactggttataagaaacctgcttcaagagagcttaaagttacatttttccctgacttaaatggtgatgtggtggctattgattataaacactacacaccctcttttaagaaaggagctaaattgttacataaacctattgtttggcatgttaacaatgcaactaataaagccacgtataaaccaaatacctggtgtatacgttgtctttggagcacaaaaccagttgaaacatcaaattcgtttgatgtactgaagtcagaggacgcgcagggaatggataatcttgcctgcgaagatctaaaaccagtctctgaagaagtagtggaaaatcctaccatacagaaagacgttcttgagtgtaatgtgaaaactaccgaagttgtaggagacattatacttaaaccagcaaataatagtttaaaaattacagaagaggttggccacacagatctaatggctgcttatgtagacaattctagtcttactattaagaaacctaatgaattatctagagtattaggtttgaaaacccttgctactcatggtttagctgctgttaatagtgtcccttgggatactatagctaattatgctaagccttttcttaacaaagttgttagtacaactactaacatagttacacggtgtttaaaccgtgtttgtactaattatatgccttatttctttactttattgctacaattgtgtacttttactagaagtacaaattctagaattaaagcatctatgccgactactatagcaaagaatactgttaagagtgtcggtaaattttgtctagaggcttcatttaattatttgaagtcacctaatttttctaaactgataaatattataatttggtttttactattaagtgtttgcctaggttctttaatctactcaaccgctgctttaggtgttttaatgtctaatttaggcatgccttcttactgtactggttacagagaaggctatttgaactctactaatgtcactattgcaacctactgtactggttctataccttgtagtgtttgtcttagtggtttagattctttagacacctatccttctttagaaactatacaaattaccatttcatcttttaaatgggatttaactgcttttggcttagttgcagagtggtttttggcatatattcttttcactaggtttttctatgtacttggattggctgcaatcatgcaattgtttttcagctattttgcagtacattttattagtaattcttggcttatgtggttaataattaatcttgtacaaatggccccgatttcagctatggttagaatgtacatcttctttgcatcattttattatgtatggaaaagttatgtgcatgttgtagacggttgtaattcatcaacttgtatgatgtgttacaaacgtaatagagcaacaagagtcgaatgtacaactattgttaatggtgttagaaggtccttttatgtctatgctaatggaggtaaaggcttttgcaaactacacaattggaattgtgttaattgtgatacattctgtgctggtagtacatttattagtgatgaagttgcgagagacttgtcactacagtttaaaagaccaataaatcctactgaccagtcttcttacatcgttgatagtgttacagtgaagaatggttccatccatctttactttgataaagctggtcaaaagacttatgaaagacattctctctctcattttgttaacttagacaacctgagagctaataacactaaaggttcattgcctattaatgttatagtttttgatggtaaatcaaaatgtgaagaatcatctgcaaaatcagcgtctgtttactacagtcagcttatgtgtcaacctatactgttactagatcaggcattagtgtctgatgttggtgatagtgcggaagttgcagttaaaatgtttgatgcttacgttaatacgttttcatcaacttttaacgtaccaatggaaaaactcaaaacactagttgcaactgcagaagctgaacttgcaaagaatgtgtccttagacaatgtcttatctacttttatttcagcagctcggcaagggtttgttgattcagatgtagaaactaaagatgttgttgaatgtcttaaattgtcacatcaatctgacatagaagttactggcgatagttgtaataactatatgctcacctataacaaagttgaaaacatgacaccccgtgaccttggtgcttgtattgactgtagtgcgcgtcatattaatgcgcaggtagcaaaaagtcacaacattgctttgatatggaacgttaaagatttcatgtcattgtctgaacaactacgaaaacaaatacgtagtgctgctaaaaagaataacttaccttttaagttgacatgtgcaactactagacaagttgttaatgttgtaacaacaaagatagcacttaagggtggtaaaattgttaataattggttgaagcagttaattaaagttacacttgtgttcctttttgttgctgctattttctatttaataacacctgttcatgtcatgtctaaacatactgacttttcaagtgaaatcataggatacaaggctattgatggtggtgtcactcgtgacatagcatctacagatacttgttttgctaacaaacatgctgattttgacacatggtttagccagcgtggtggtagttatactaatgacaaagcttgcccattgattgctgcagtcataacaagagaagtgggttttgtcgtgcctggtttgcctggcacgatattacgcacaactaatggtgactttttgcatttcttacctagagtttttagtgcagttggtgacatctgttacacaccatcaaaacttatagagtacactgactttgcaacatcagcttgtgttttggctgctgaatgtacaatttttaaagatgcttctggtaagccagtaccatattgttatgataccaatgtactagaaggttctgttgcttatgaaagtttacgccctgacacacgttatgtgctcatggatggctctattattcaatttcctaacacctaccttgaaggttctgttagagtggtaacaacttttgattctgagtactgtaggcacggcacttgtgaaagatcagaagctggtgtttgtgtatctactagtggtagatgggtacttaacaatgattattacagatctttaccaggagttttctgtggtgtagatgctgtaaatttacttactaatatgtttacaccactaattcaacctattggtgctttggacatatcagcatctatagtagctggtggtattgtagctatcgtagtaacatgccttgcctactattttatgaggtttagaagagcttttggtgaatacagtcatgtagttgcctttaatactttactattccttatgtcattcactgtactctgtttaacaccagtttactcattcttacctggtgtttattctgttatttacttgtacttgacattttatcttactaatgatgtttcttttttagcacatattcagtggatggttatgttcacacctttagtacctttctggataacaattgcttatatcatttgtatttccacaaagcatttctattggttctttagtaattacctaaagagacgtgtagtctttaatggtgtttcctttagtacttttgaagaagctgcgctgtgcacctttttgttaaataaagaaatgtatctaaagttgcgtagtgatgtgctattacctcttacgcaatataatagatacttagctctttataataagtacaagtattttagtggagcaatggatacaactagctacagagaagctgcttgttgtcatctcgcaaaggctctcaatgacttcagtaactcaggttctgatgttctttaccaaccaccacaaacctctatcacctcagctgttttgcagagtggttttagaaaaatggcattcccatctggtaaagttgagggttgtatggtacaagtaacttgtggtacaactacacttaacggtctttggcttgatgacgtagtttactgtccaagacatgtgatctgcacctctgaagacatgcttaaccctaattatgaagatttactcattcgtaagtctaatcataatttcttggtacaggctggtaatgttcaactcagggttattggacattctatgcaaaattgtgtacttaagcttaaggttgatacagccaatcctaagacacctaagtataagtttgttcgcattcaaccaggacagactttttcagtgttagcttgttacaatggttcaccatctggtgtttaccaatgtgctatgaggcccaatttcactattaagggttcattccttaatggttcatgtggtagtgttggttttaacatagattatgactgtgtctctttttgttacatgcaccatatggaattaccaactggagttcatgctggcacagacttagaaggtaacttttatggaccttttgttgacaggcaaacagcacaagcagctggtacggacacaactattacagttaatgttttagcttggttgtacgctgctgttataaatggagacaggtggtttctcaatcgatttaccacaactcttaatgactttaaccttgtggctatgaagtacaattatgaacctctaacacaagaccatgttgacatactaggacctctttctgctcaaactggaattgccgttttagatatgtgtgcttcattaaaagaattactgcaaaatggtatgaatggacgtaccatattgggtagtgctttattagaagatgaatttacaccttttgatgttgttagacaatgctcaggtgttactttccaaagtgcagtgaaaagaacaatcaagggtacacaccactggttgttactcacaattttgacttcacttttagttttagtccagagtactcaatggtctttgttcttttttttgtatgaaaatgcctttttaccttttgctatgggtattattgctatgtctgcttttgcaatgatgtttgtcaaacataagcatgcatttctctgtttgtttttgttaccttctcttgccactgtagcttattttaatatggtctatatgcctgctagttgggtgatgcgtattatgacatggttggatatggttgatactagtttgtctggttttaagctaaaagactgtgttatgtatgcatcagctgtagtgttactaatccttatgacagcaagaactgtgtatgatgatggtgctaggagagtgtggacacttatgaatgtcttgacactcgtttataaagtttattatggtaatgctttagatcaagccatttccatgtgggctcttataatctctgttacttctaactactcaggtgtagttacaactgtcatgtttttggccagaggtattgtttttatgtgtgttgagtattgccctattttcttcataactggtaatacacttcagtgtataatgctagtttattgtttcttaggctatttttgtacttgttactttggcctcttttgtttactcaaccgctactttagactgactcttggtgtttatgattacttagtttctacacaggagtttagatatatgaattcacagggactactcccacccaagaatagcatagatgccttcaaactcaacattaaattgttgggtgttggtggcaaaccttgtatcaaagtagccactgtacagtctaaaatgtcagatgtaaagtgcacatcagtagtcttactctcagttttgcaacaactcagagtagaatcatcatctaaattgtgggctcaatgtgtccagttacacaatgacattctcttagctaaagatactactgaagcctttgaaaaaatggtttcactactttctgttttgctttccatgcagggtgctgtagacataaacaagctttgtgaagaaatgctggacaacagggcaaccttacaagctatagcctcagagtttagttcccttccatcatatgcagcttttgctactgctcaagaagcttatgagcaggctgttgctaatggtgattctgaagttgttcttaaaaagttgaagaagtctttgaatgtggctaaatctgaatttgaccgtgatgcagccatgcaacgtaagttggaaaagatggctgatcaagctatgacccaaatgtataaacaggctagatctgaggacaagagggcaaaagttactagtgctatgcagacaatgcttttcactatgcttagaaagttggataatgatgcactcaacaacattatcaacaatgcaagagatggttgtgttcccttgaacataatacctcttacaacagcagccaaactaatggttgtcataccagactataacacatataaaaatacgtgtgatggtacaacatttacttatgcatcagcattgtgggaaatccaacaggttgtagatgcagatagtaaaattgttcaacttagtgaaattagtatggacaattcacctaatttagcatggcctcttattgtaacagctttaagggccaattctgctgtcaaattacagaataatgagcttagtcctgttgcactacgacagatgtcttgtgctgccggtactacacaaactgcttgcactgatgacaatgcgttagcttactacaacacaacaaagggaggtaggtttgtacttgcactgttatccgatttacaggatttgaaatgggctagattccctaagagtgatggaactggtactatctatacagaactggaaccaccttgtaggtttgttacagacacacctaaaggtcctaaagtgaagtatttatactttattaaaggattaaacaacctaaatagaggtatggtacttggtagtttagctgccacagtacgtctacaagctggtaatgcaacagaagtgcctgccaattcaactgtattatctttctgtgcttttgctgtagatgctgctaaagcttacaaagattatctagctagtgggggacaaccaatcactaattgtgttaagatgttgtgtacacacactggtactggtcaggcaataacagttacaccggaagccaatatggatcaagaatcctttggtggtgcatcgtgttgtctgtactgccgttgccacatagatcatccaaatcctaaaggattttgtgacttaaaaggtaagtatgtacaaatacctacaacttgtgctaatgaccctgtgggttttacacttaaaaacacagtctgtaccgtctgcggtatgtggaaaggttatggctgtagttgtgatcaactccgcgaacccatgcttcagtcagctgatgcacaatcgtttttaaacgggtttgcggtgtaagtgcagcccgtcttacaccgtgcggcacaggcactagtactgatgtcgtatacagggcttttgacatctacaatgataaagtagctggttttgctaaattcctaaaaactaattgttgtcgcttccaagaaaaggacgaagatgacaatttaattgattcttactttgtagttaagagacacactttctctaactaccaacatgaagaaacaatttataatttacttaaggattgtccagctgttgctaaacatgacttctttaagtttagaatagacggtgacatggtaccacatatatcacgtcaacgtcttactaaatacacaatggcagacctcgtctatgctttaaggcattttgatgaaggtaattgtgacacattaaaagaaatacttgtcacatacaattgttgtgatgatgattatttcaataaaaaggactggtatgattttgtagaaaacccagatatattacgcgtatacgccaacttaggtgaacgtgtacgccaagctttgttaaaaacagtacaattctgtgatgccatgcgaaatgctggtattgttggtgtactgacattagataatcaagatctcaatggtaactggtatgatttcggtgatttcatacaaaccacgccaggtagtggagttcctgttgtagattcttattattcattgttaatgcctatattaaccttgaccagggctttaactgcagagtcacatgttgacactgacttaacaaagccttacattaagtgggatttgttaaaatatgacttcacggaagagaggttaaaactctttgaccgttattttaaatattgggatcagacataccacccaaattgtgttaactgtttggatgacagatgcattctgcattgtgcaaactttaatgttttattctctacagtgttcccacttacaagttttggaccactagtgagaaaaatatttgttgatggtgttccatttgtagtttcaactggataccacttcagagagctaggtgttgtacataatcaggatgtaaacttacatagctctagacttagttttaaggaattacttgtgtatgctgctgaccctgctatgcacgctgcttctggtaatctattactagataaacgcactacgtgcttttcagtagctgcacttactaacaatgttgcttttcaaactgtcaaacccggtaattttaacaaagacttctatgactttgctgtgtctaagggtttctttaaggaaggaagttctgttgaattaaaacacttcttctttgctcaggatggtaatgctgctatcagcgattatgactactatcgttataatctaccaacaatgtgtgatatcagacaactactatttgtagttgaagttgttgataagtactttgattgttacgatggtggctgtattaatgctaaccaagtcatcgtcaacaacctagacaaatcagctggttttccatttaataaatggggtaaggctagactttattatgattcaatgagttatgaggatcaagatgcacttttcgcatatacaaaacgtaatgtcatccctactataactcaaatgaatcttaagtatgccattagtgcaaagaatagagctcgcaccgtagctggtgtctctatctgtagtactatgaccaatagacagtttcatcaaaaattattgaaatcaatagccgccactagaggagctactgtagtaattggaacaagcaaattctatggtggttggcacaacatgttaaaaactgtttatagtgatgtagaaaaccctcaccttatgggttgggattatcctaaatgtgatagagccatgcctaacatgcttagaattatggcctcacttgttcttgctcgcaaacatacaacgtgttgtagcttgtcacaccgtttctatagattagctaatgagtgtgctcaagtattgagtgaaatggtcatgtgtggcggttcactatatgttaaaccaggtggaacctcatcaggagatgccacaactgcttatgctaatagtgtttttaacatttgtcaagctgtcacggccaatgttaatgcacttttatctactgatggtaacaaaattgccgataagtatgtccgcaatttacaacacagactttatgagtgtctctatagaaatagagatgttgacacagactttgtgaatgagttttacgcatatttgcgtaaacatttctcaatgatgatactctctgacgatgctgttgtgtgtttcaatagcacttatgcatctcaaggtctagtggctagcataaagaactttaagtcagttctttattatcaaaacaatgtttttatgtctgaagcaaaatgttggactgagactgaccttactaaaggacctcatgaattttgctctcaacatacaatgctagttaaacagggtgatgattatgtgtaccttccttacccagatccatcaagaatcctaggggccggctgttttgtagatgatatcgtaaaaacagatggtacacttatgattgaacggttcgtgtctttagctatagatgcttacccacttactaaacatcctaatcaggagtatgctgatgtctttcatttgtacttacaatacataagaaagctacatgatgagttaacaggacacatgttagacatgtattctgttatgcttactaatgataacacttcaaggtattgggaacctgagttttatgaggctatgtacacaccgcatacagtcttacaggctgttggggcttgtgttctttgcaattcacagacttcattaagatgtggtgcttgcatacgtagaccattcttatgttgtaaatgctgttacgaccatgtcatatcaacatcacataaattagtcttgtctgttaatccgtatgtttgcaatgctccaggttgtgatgtcacagatgtgactcaactttacttaggaggtatgagctattattgtaaatcacataaaccacccattagttttccattgtgtgctaatggacaagtttttggtttatataaaaatacatgtgttggtagcgataatgttactgactttaatgcaattgcaacatgtgactggacaaatgctggtgattacattttagctaacacctgtactgaaagactcaagctttttgcagcagaaacgctcaaagctactgaggagacatttaaactgtcttatggtattgctactgtacgtgaagtgctgtctgacagagaattacatctttcatgggaagttggtaaacctagaccaccacttaaccgaaattatgtctttactggttatcgtgtaactaaaaacagtaaagtacaaataggagagtacacctttgaaaaaggtgactatggtgatgctgttgtttaccgaggtacaacaacttacaaattaaatgttggtgattattttgtgctgacatcacatacagtaatgccattaagtgcacctacactagtgccacaagagcactatgttagaattactggcttatacccaacactcaatatctcagatgagttttctagcaatgttgcaaattatcaaaaggttggtatgcaaaagtattctacactccagggaccacctggtactggtaagagtcattttgctattggcctagctctctactacccttctgctcgcatagtgtatacagcttgctctcatgccgctgttgatgcactatgtgagaaggcattaaaatatttgcctatagataaatgtagtagaattatacctgcacgtgctcgtgtagagtgttttgataaattcaaagtgaattcaacattagaacagtatgtcttttgtactgtaaatgcattgcctgagacgacagcagatatagttgtctttgatgaaatttcaatggccacaaattatgatttgagtgttgtcaatgccagattacgtgctaagcactatgtgtacattggcgaccctgctcaattacctgcaccacgcacattgctaactaagggcacactagaaccagaatatttcaattcagtgtgtagacttatgaaaactataggtccagacatgttcctcggaacttgtcggcgttgtcctgctgaaattgttgacactgtgagtgctttggtttatgataataagcttaaagcacataaagacaaatcagctcaatgctttaaaatgttttataagggtgttatcacgcatgatgtttcatctgcaattaacaggccacaaataggcgtggtaagagaattccttacacgtaaccctgcttggagaaaagctgtctttatttcaccttataattcacagaatgctgtagcctcaaagattttgggactaccaactcaaactgttgattcatcacagggctcagaatatgactatgtcatattcactcaaaccactgaaacagctcactcttgtaatgtaaacagatttaatgttgctattaccagagcaaaagtaggcatactttgcataatgtctgatagagacctttatgacaagttgcaatttacaagtcttgaaattccacgtaggaatgtggcaactttacaagctgaaaatgtaacaggactctttaaagattgtagtaaggtaatcactgggttacatcctacacaggcacctacacacctcagtgttgacactaaattcaaaactgaaggtttatgtgttgacatacctggcatacctaaggacatgacctatagaagactcatctctatgatgggttttaaaatgaattatcaagttaatggttaccctaacatgtttatcacccgcgaagaagctataagacatgtacgtgcatggattggcttcgatgtcgaggggtgtcatgctactagagaagctgttggtaccaatttacctttacagctaggtttttctacaggtgttaacctagttgctgtacctacaggttatgttgatacacctaataatacagatttttccagagttagtgctaaaccaccgcctggagatcaatttaaacacctcataccacttatgtacaaaggacttccttggaatgtagtgcgtataaagattgtacaaatgttaagtgacacacttaaaaatctctctgacagagtcgtatttgtcttatgggcacatggctttgagttgacatctatgaagtattttgtgaaaataggacctgagcgcacctgttgtctatgtgatagacgtgccacatgcttttccactgcttcagacacttatgcctgttggcatcattctattggatttgattacgtctataatccgtttatgattgatgttcaacaatggggttttacaggtaacctacaaagcaaccatgatctgtattgtcaagtccatggtaatgcacatgtagctagttgtgatgcaatcatgactaggtgtctagctgtccacgagtgctttgttaagcgtgttgactggactattgaatatcctataattggtgatgaactgaagattaatgcggcttgtagaaaggttcaacacatggttgttaaagctgcattattagcagacaaattcccagttcttcacgacattggtaaccctaaagctattaagtgtgtacctcaagctgatgtagaatggaagttctatgatgcacagccttgtagtgacaaagcttataaaatagaagaattattctattcttatgccacacattctgacaaattcacagatggtgtatgcctattttggaattgcaatgtcgatagatatcctgctaattccattgtttgtagatttgacactagagtgctatctaaccttaacttgcctggttgtgatggtggcagtttgtatgtaaataaacatgcattccacacaccagcttttgataaaagtgcttttgttaatttaaaacaattaccatttttctattactctgacagtccatgtgagtctcatggaaaacaagtagtgtcagatatagattatgtaccactaaagtctgctacgtgtataacacgttgcaatttaggtggtgctgtctgtagacatcatgctaatgagtacagattgtatctcgatgcttataacatgatgatctcagctggctttagcttgtgggtttacaaacaatttgatacttataacctctggaacacttttacaagacttcagagtttagaaaatgtggcttttaatgttgtaaataagggacactttgatggacaacagggtgaagtaccagtttctatcattaataacactgtttacacaaaagttgatggtgttgatgtagaattgtttgaaaataaaacaacattacctgttaatgtagcatttgagctttgggctaagcgcaacattaaaccagtaccagaggtgaaaatactcaataatttgggtgtggacattgctgctaatactgtgatctgggactacaaaagagatgctccagcacatatatctactattggtgtttgttctatgactgacatagccaagaaaccaactgaaacgatttgtgcaccactcactgtcttttttgatggtagagttgatggtcaagtagacttatttagaaatgcccgtaatggtgttcttattacagaaggtagtgttaaaggtttacaaccatctgtaggtcccaaacaagctagtcttaatggagtcacattaattggagaagccgtaaaaacacagttcaattattataagaaagttgatggtgttgtccaacaattacctgaaacttactttactcagagtagaaatttacaagaatttaaacccaggagtcaaatggaaattgatttcttagaattagctatggatgaattcattgaacggtataaattagaaggctatgccttcgaacatatcgtttatggagattttagtcatagtcagttaggtggtttacatctactgattggactagctaaacgttttaaggaatcaccttttgaattagaagattttattcctatggacagtacagttaaaaactatttcataacagatgcgcaaacaggttcatctaagtgtgtgtgttctgttattgatttattacttgatgattttgttgaaataataaaatcccaagatttatctgtagtttctaaggttgtcaaagtgactattgactatacagaaatttcatttatgctttggtgtaaagatggccatgtagaaacattttacccaaaattacaatctagtcaagcgtggcaaccgggtgttgctatgcctaatctttacaaaatgcaaagaatgctattagaaaagtgtgaccttcaaaattatggtgatagtgcaacattacctaaaggcataatgatgaatgtcgcaaaatatactcaactgtgtcaatatttaaacacattaacattagctgtaccctataatatgagagttatacattttggtgctggttctgataaaggagttgcaccaggtacagctgttttaagacagtggttgcctacgggtacgctgcttgtcgattcagatcttaatgactttgtctctgatgcagattcaactttgattggtgattgtgcaactgtacatacagctaataaatgggatctcattattagtgatatgtacgaccctaagactaaaaatgttacaaaagaaaatgactctaaagagggttttttcacttacatttgtgggtttatacaacaaaagctagctcttggaggttccgtggctataaagataacagaacattcttggaatgctgatctttataagctcatgggacacttcgcatggtggacagcctttgttactaatgtgaatgcgtcatcatctgaagcatttttaattggatgtaattatcttggcaaaccacgcgaacaaatagatggttatgtcatgcatgcaaattacatattttggaggaatacaaatccaattcagttgtcttcctattctttatttgacatgagtaaatttccccttaaattaaggggtactgctgttatgtctttaaaagaaggtcaaatcaatgatatgattttatctcttcttagtaaaggtagacttataattagagaaaacaacagagttgttatttctagtgatgttcttgttaacaactaaacgaacaatgtttgtttttcttgttttattgccactagtctctagtcagtgtgttaatcttacaaccagaactcaattaccccctgcatacactaattctttcacacgtggtgtttattaccctgacaaagttttcagatcctcagttttacattcaactcaggacttgttcttacctttcttttccaatgttacttggttccatgctatacatgtctctgggaccaatggtactaagaggtttgataaccctgtcctaccatttaatgatggtgtttattttgcttccactgagaagtctaacataataagaggctggatttttggtactactttagattcgaagacccagtccctacttattgttaataacgctactaatgttgttattaaagtctgtgaatttcaattttgtaatgatccatttttgggtgtttattaccacaaaaacaacaaaagttggatggaaagtgagttcagagtttattctagtgcgaataattgcacttttgaatatgtctctcagccttttcttatggaccttgaaggaaaacagggtaatttcaaaaatcttagggaatttgtgtttaagaatattgatggttattttaaaatatattctaagcacacgcctattaatttagtgcgtgatctccctcagggtttttcggctttagaaccattggtagatttgccaataggtattaacatcactaggtttcaaactttacttgctttacatagaagttatttgactcctggtgattcttcttcaggttggacagctggtgctgcagcttattatgtgggttatcttcaacctaggacttttctattaaaatataatgaaaatggaaccattacagatgctgtagactgtgcacttgaccctctctcagaaacaaagtgtacgttgaaatccttcactgtagaaaaaggaatctatcaaacttctaactttagagtccaaccaacagaatctattgttagatttcctaatattacaaacttgtgcccttttggtgaagtttttaacgccaccagatttgcatctgtttatgcttggaacaggaagagaatcagcaactgtgttgctgattattctgtcctatataattccgcatcattttccacttttaagtgttatggagtgtctcctactaaattaaatgatctctgctttactaatgtctatgcagattcatttgtaattagaggtgatgaagtcagacaaatcgctccagggcaaactggaaagattgctgattataattataaattaccagatgattttacaggctgcgttatagcttggaattctaacaatcttgattctaaggttggtggtaattataattacctgtatagattgtttaggaagtctaatctcaaaccttttgagagagatatttcaactgaaatctatcaggccggtagcacaccttgtaatggtgttgaaggttttaattgttactttcctttacaatcatatggtttccaacccactaatggtgttggttaccaaccatacagagtagtagtactttcttttgaacttctacatgcaccagcaactgtttgtggacctaaaaagtctactaatttggttaaaaacaaatgtgtcaatttcaacttcaatggtttaacaggcacaggtgttcttactgagtctaacaaaaagtttctgcctttccaacaatttggcagagacattgctgacactactgatgctgtccgtgatccacagacacttgagattcttgacattacaccatgttcttttggtggtgtcagtgttataacaccaggaacaaatacttctaaccaggttgctgttctttatcagggtgttaactgcacagaagtccctgttgctattcatgcagatcaacttactcctacttggcgtgtttattctacaggttctaatgtttttcaaacacgtgcaggctgtttaataggggctgaacatgtcaacaactcatatgagtgtgacatacccattggtgcaggtatatgcgctagttatcagactcagactaattctcctcggcgggcacgtagtgtagctagtcaatccatcattgcctacactatgtcacttggtgcagaaaattcagttgcttactctaataactctattgccatacccacaaattttactattagtgttaccacagaaattctaccagtgtctatgaccaagacatcagtagattgtacaatgtacatttgtggtgattcaactgaatgcagcaatcttttgttgcaatatggcagtttttgtacacaattaaaccgtgctttaactggaatagctgttgaacaagacaaaaacacccaagaagtttttgcacaagtcaaacaaatttacaaaacaccaccaattaaagattttggtggttttaatttttcacaaatattaccagatccatcaaaaccaagcaagaggtcatttattgaagacctacttttcaacaaagtgacacttgcagatgctggcttcatcaaacaatatggtgattgccttggtgatattgctgctagagacctcatttgtgcacaaaagtttaacggccttactgttttgccacctttgctcacagatgaaatgattgctcaatacacttctgcactgttagcgggtacaatcacttctggttggacctttggtgcaggtgctgcattacaaataccatttgctatgcaaatggcttataggtttaatggtattggagttacacagaatgttctctatgagaaccaaaaattgattgccaaccaatttaatagtgctattggcaaaattcaagactcactttcttccacagcaagtgcacttggaaaacttcaagatgtggtcaaccaaaatgcacaagctttaaacacgcttgttaaacaacttagctccaattttggtgcaatttcaagtgttttaaatgatatcctttcacgtcttgacaaagttgaggctgaagtgcaaattgataggttgatcacaggcagacttcaaagtttgcagacatatgtgactcaacaattaattagagctgcagaaatcagagcttctgctaatcttgctgctactaaaatgtcagagtgtgtacttggacaatcaaaaagagttgatttttgtggaaagggctatcatcttatgtccttccctcagtcagcacctcatggtgtagtcttcttgcatgtgacttatgtccctgcacaagaaaagaacttcacaactgctcctgccatttgtcatgatggaaaagcacactttcctcgtgaaggtgtctttgtttcaaatggcacacactggtttgtaacacaaaggaatttttatgaaccacaaatcattactacagacaacacatttgtgtctggtaactgtgatgttgtaataggaattgtcaacaacacagtttatgatcctttgcaacctgaattagactcattcaaggaggagttagataaatattttaagaatcatacatcaccagatgttgatttaggtgacatctctggcattaatgcttcagttgtaaacattcaaaaagaaattgaccgcctcaatgaggttgccaagaatttaaatgaatctctcatcgatctccaagaacttggaaagtatgagcagtatataaaatggccatggtacatttggctaggttttatagctggcttgattgccatagtaatggtgacaattatgctttgctgtatgaccagttgctgtagttgtctcaagggctgttgttcttgtggatcctgctgcaaatttgatgaagacgactctgagccagtgctcaaaggagtcaaattacattacacataaacgaacttatggatttgtttatgagaatcttcacaattggaactgtaactttgaagcaaggtgaaatcaaggatgctactccttcagattttgttcgcgctactgcaacgataccgatacaagcctcactccctttcggatggcttattgttggcgttgcacttcttgctgtttttcagagcgcttccaaaatcataaccctcaaaaagagatggcaactagcactctccaagggtgttcactttgtttgcaacttgctgttgttgtttgtaacagtttactcacaccttttgctcgttgctgctggccttgaagccccttttctctatctttatgctttagtctacttcttgcagagtataaactttgtaagaataataatgaggctttggctttgctggaaatgccgttccaaaaacccattactttatgatgccaactattttctttgctggcatactaattgttacgactattgtataccttacaatagtgtaacttcttcaattgtcattacttcaggtgatggcacaacaagtcctatttctgaacatgactaccagattggtggttatactgaaaaatgggaatctggagtaaaagactgtgttgtattacacagttacttcacttcagactattaccagctgtactcaactcaattgagtacagacactggtgttgaacatgttaccttcttcatctacaataaaattgttgatgagcctgaagaacatgtccaaattcacacaatcgacggttcatccggagttgttaatccagtaatggaaccaatttatgatgaaccgacgacgactactagcgtgcctttgtaagcacaagctgatgagtacgaacttatgtactcattcgtttcggaagagacaggtacgttaatagttaatagcgtacttctttttcttgctttcgtggtattcttgctagttacactagccatccttactgcgcttcgattgtgtgcgtactgctgcaatattgttaacgtgagtcttgtaaaaccttctttttacgtttactctcgtgttaaaaatctgaattcttctagagttcctgatcttctggtctaaacgaactaaatattatattagtttttctgtttggaactttaattttagccatggcagattccaacggtactattaccgttgaagagcttaaaaagctccttgaacaatggaacctagtaataggtttcctattccttacatggatttgtcttctacaatttgcctatgccaacaggaataggtttttgtatataattaagttaattttcctctggctgttatggccagtaactttagcttgttttgtgcttgctgctgtttacagaataaattggatcaccggtggaattgctatcgcaatggcttgtcttgtaggcttgatgtggctcagctacttcattgcttctttcagactgtttgcgcgtacgcgttccatgtggtcattcaatccagaaactaacattcttctcaacgtgccactccatggcactattctgaccagaccgcttctagaaagtgaactcgtaatcggagctgtgatccttcgtggacatcttcgtattgctggacaccatctaggacgctgtgacatcaaggacctgcctaaagaaatcactgttgctacatcacgaacgctttcttattacaaattgggagcttcgcagcgtgtagcaggtgactcaggttttgctgcatacagtcgctacaggattggcaactataaattaaacacagaccattccagtagcagtgacaatattgctttgcttgtacagtaagtgacaacagatgtttcatctcgttgactttcaggttactatagcagagatattactaattattatgaggacttttaaagtttccatttggaatcttgattacatcataaacctcataattaaaaatttatctaagtcactaactgagaataaatattctcaattagatgaagagcaaccaatggagattgattaaacgaacatgaaaattattcttttcttggcactgataacactcgctacttgtgagctttatcactaccaagagtgtgttagaggtacaacagtacttttaaaagaaccttgctcttctggaacatacgagggcaattcaccatttcatcctctagctgataacaaatttgcactgacttgctttagcactcaatttgcttttgcttgtcctgacggcgtaaaacacgtctatcagttacgtgccagatcagtttcacctaaactgttcatcagacaagaggaagttcaagaactttactctccaatttttcttattgttgcggcaatagtgtttataacactttgcttcacactcaaaagaaagacagaatgattgaactttcattaattgacttctatttgtgctttttagcctttctgctattccttgttttaattatgcttattatcttttggttctcacttgaactgcaagatcataatgaaacttgtcacgcctaaacgaacatgaaatttcttgttttcttaggaatcatcacaactgtagctgcatttcaccaagaatgtagtttacagtcatgtactcaacatcaaccatatgtagttgatgacccgtgtcctattcacttctattctaaatggtatattagagtaggagctagaaaatcagcacctttaattgaattgtgcgtggatgaggctggttctaaatcacccattcagtacatcgatatcggtaattatacagtttcctgtttaccttttacaattaattgccaggaacctaaattgggtagtcttgtagtgcgttgttcgttctatgaagactttttagagtatcatgacgttcgtgttgttttagatttcatctaaacgaacaaactaaaatgtctgataatggaccccaaaatcagcgaaatgcaccccgcattacgtttggtggaccctcagattcaactggcagtaaccagaatggagaacgcagtggggcgcgatcaaaacaacgtcggccccaaggtttacccaataatactgcgtcttggttcaccgctctcactcaacatggcaaggaagaccttaaattccctcgaggacaaggcgttccaattaacaccaatagcagtccagatgaccaaattggctactaccgaagagctaccagacgaattcgtggtggtgacggtaaaatgaaagatctcagtccaagatggtatttctactacctaggaactgggccagaagctggacttccctatggtgctaacaaagacggcatcatatgggttgcaactgagggagccttgaatacaccaaaagatcacattggcacccgcaatcctgctaacaatgctgcaatcgtgctacaacttcctcaaggaacaacattgccaaaaggcttctacgcagaagggagcagaggcggcagtcaagcctcttctcgttcctcatcacgtagtcgcaacagttcaagaaattcaactccaggcagcagtaaacgaacttctcctgctagaatggctggcaatggcggtgatgctgctcttgctttgctgctgcttgacagattgaaccagcttgagagcaaaatgtctggtaaaggccaacaacaacaaggccaaactgtcactaagaaatctgctgctgaggcttctaagaagcctcggcaaaaacgtactgccactaaagcatacaatgtaacacaagctttcggcagacgtggtccagaacaaacccaaggaaattttggggaccaggaactaatcagacaaggaactgattacaaacattggccgcaaattgcacaatttgcccccagcgcttcagcgttcttcggaatgtcgcgcattggcatggaagtcacaccttcgggaacgtggttgacctacacaggtgccatcaaattggatgacaaagatccaaatttcaaagatcaagtcattttgctgaataagcatattgacgcatacaaaacattcccaccaacagagcctaaaaaggacaaaaagaagaaggctgatgaaactcaagccttaccgcagagacagaagaaacagcaaactgtgactcttcttcctgctgcagatttggatgatttctccaaacaattgcaacaatccatgagcagtgctgactcaactcaggcctaaactcatgcagaccacacaaggcagatgggctatataaacgttttcgcttttccgtttacgatatatagtctactcttgtgcagaatgaattctcgtaactacatagcacaagtagatgtagttaactttaatctcacatagcaatctttaatcagtgtgtaacattagggaggacttgaaagagccaccacattttcaccgaggccacgcggagtacgatcgagtgtacagtgaacaatgctagggagagctgcctatatggaagagccctaatgtgtaaaattaattttagtagtgctatccccatgtgattttaatagcttcttaggaga

SEQ ID NO: 7 - DNA, 29882 bp, SARS-CoV-2
attaaaggtttataccttcccaggtaacaaaccaaccaactttcgatctcttgtagatctgttctctaaacgaactttaaaatctgtgtggctgtcactcggctgcatgcttagtgcactcacgcagtataattaataactaattactgtcgttgacaggacacgagtaactcgtctatcttctgcaggctgcttacggtttcgtccgtgttgcagccgatcatcagcacatctaggtttcgtccgggtgtgaccgaaaggtaagatggagagccttgtccctggtttcaacgagaaaacacacgtccaactcagtttgcctgttttacaggttcgcgacgtgctcgtacgtggctttggagactccgtggaggaggtcttatcagaggcacgtcaacatcttaaagatggcacttgtggcttagtagaagttgaaaaaggcgttttgcctcaacttgaacagccctatgtgttcatcaaacgttcggatgctcgaactgcacctcatggtcatgttatggttgagctggtagcagaactcgaaggcattcagtacggtcgtagtggtgagacacttggtgtccttgtccctcatgtgggcgaaataccagtggcttaccgcaaggttcttcttcgtaagaacggtaataaaggagctggtggccatagttacggcgccgatctaaagtcatttgacttaggcgacgagcttggcactgatccttatgaagattttcaagaaaactggaacactaaacatagcagtggtgttacccgtgaactcatgcgtgagcttaacggaggggcatacactcgctatgtcgataacaacttctgtggccctgatggctaccctcttgagtgcattaaagaccttctagcacgtgctggtaaagcttcatgcactttgtccgaacaactggactttattgacactaagaggggtgtatactgctgccgtgaacatgagcatgaaattgcttggtacacggaacgttctgaaaagagctatgaattgcagacaccttttgaaattaaattggcaaagaaatttgacaccttcaatggggaatgtccaaattttgtatttcccttaaattccataatcaagactattcaaccaagggttgaaaagaaaaagcttgatggctttatgggtagaattcgatctgtctatccagttgcgtcaccaaatgaatgcaaccaaatgtgcctttcaactctcatgaagtgtgatcattgtggtgaaacttcatggcagacgggcgattttgttaaagccacttgcgaattttgtggcactgagaatttgactaaagaaggtgccactacttgtggttacttaccccaaaatgctgttgttaaaatttattgtccagcatgtcacaattcagaagtaggacctgagcatagtcttgccgaataccataatgaatctggcttgaaaaccattcttcgtaagggtggtcgcactattgcctttggaggctgtgtgttctcttatgttggttgccataacaagtgtgcctattgggttccacgtgctagcgctaacataggttgtaaccatacaggtgttgttggagaaggttccgaaggtcttaatgacaaccttcttgaaatactccaaaaagagaaagtcaacatcaatattgttggtgactttaaacttaatgaagagatcgccattattttggcatctttttctgcttccacaagtgcttttgtggaaactgtgaaaggtttggattataaagcattcaaacaaattgttgaatcctgtggtaattttaaagttacaaaaggaaaagctaaaaaaggtgcctggaatattggtgaacagaaatcaatactgagtcctctttatgcatttgcatcagaggctgctcgtgttgtacgatcaattttctcccgcactcttgaaactgctcaaaattctgtgcgtgttttacagaaggccgctataacaatactagatggaatttcacagtattcactgagactcattgatgctatgatgttcacatctgatttggctactaacaatctagttgtaatggcctacattacaggtggtgttgttcagttgacttcgcagtggctaactaacatctttggcactgtttatgaaaaactcaaacccgtccttgattggcttgaagagaagtttaaggaaggtgtagagtttcttagagacggttgggaaattgttaaatttatctcaacctgtgcttgtgaaattgtcggtggacaaattgtcacctgtgcaaaggaaattaaggagagtgttcagacattctttaagcttgtaaataaatttttggctttgtgtgctgactctatcattattggtggagctaaacttaaagccttgaatttaggtgaaacatttgtcacgcactcaaagggattgtacagaaagtgtgttaaatccagagaagaaactggcctactcatgcctctaaaagccccaaaagaaattatcttcttagagggagaaacacttcccacagaagtgttaacagaggaagttgtcttgaaaactggtgatttacaaccattagaacaacctactagtgaagctgttgaagctccattggttggtacaccagtttgtattaacgggcttatgttgctcgaaatcaaagacacagaaaagtactgtgcccttgcacctaatatgatggtaacaaacaataccttcacactcaaaggcggtgcaccaacaaaggttacttttggtgatgacactgtgatagaagtgcaaggttacaagagtgtgaatatcacttttgaacttgatgaaaggattgataaagtacttaatgagaagtgctctgcctatacagttgaactcggtacagaagtaaatgagttcgcctgtgttgtggcagatgctgtcataaaaactttgcaaccagtatctgaattacttacaccactgggcattgatttagatgagtggagtatggctacatactacttatttgatgagtctggtgagtttaaattggcttcacatatgtattgttctttctaccctccagatgaggatgaagaagaaggtgattgtgaagaagaagagtttgagccatcaactcaatatgagtatggtactgaagatgattaccaaggtaaacctttggaatttggtgccacttctgctgctcttcaacctgaagaagagcaagaagaagattggttagatgatgatagtcaacaaactgttggtcaacaagacggcagtgaggacaatcagacaactactattcaaacaattgttgaggttcaacctcaattagagatggaacttacaccagttgttcagactattgaagtgaatagttttagtggttatttaaaacttactgacaatgtatacattaaaaatgcagacattgtggaagaagctaaaaaggtaaaaccaacagtggttgttaatgcagccaatgtttaccttaaacatggaggaggtgttgcaggagccttaaataaggctactaacaatgccatgcaagttgaatctgatgattacatagctactaatggaccacttaaagtgggtggtagttgtgttttaagcggacacaatcttgctaaacactgtcttcatgttgtcggcccaaatgttaacaaaggtgaagacattcaacttcttaagagtgcttatgaaaattttaatcagcacgaagttctacttgcaccattattatcagctggtatttttggtgctgaccctatacattctttaagagtttgtgtagatactgttcgcacaaatgtytacttagctgtctttgataaaaatctctatgacaaacttgtttcaagctttttggaaatgaagagtgaaaagcaagttgaacaaaagatcgctgagattcctaaagaggaagttaagccatttataactgaaagtaaaccttcagttgaacagagaaaacaagatgataagaaaatcaaagcttgtgttgaagaagttacaacaactctggaagaaactaagttcctcacagaaaacttgttactttatattgacattaatggcaatcttcatccagattctgccactcttgttagtgacattgacatcactttcttaaagaaagatgctccatatatagtgggtgatgttgttcaagagggtgttttaactgctgtggttatacctactaaaaaggctggtggcactactgaaatgctagcgaaagctttgagaaaagtgccaacagacaattatataaccacttacccgggtcagggtttaaatggttacactgtagaggaggcaaagacagtgcttaaaaagtgtaaaagtgccttttacattctaccatctattatctctaatgagaagcaagaaattcttggaactgtttcttggaatttgcgagaaatgcttgcacatgcagaagaaacacgcaaattaatgcctgtctgtgtggaaactaaagccatagtttcaactatacagcgtaaatataagggtattaaaatacaagagggtgtggttgattatggtgctagattttacttttacaccagtaaaacaactgtagcgtcacttatcaacacacttaacgatctaaatgaaactcttgttacaatgccacttggctatgtaacacatggcttaaatttggaagaagctgctcggtatatgagatctctcaaagtgccagctacagtttctgtttcttcacctgatgctgttacagcgtataatggttatcttacttcttcttctaaaacacctgaagaacattttattgaaaccatctcacttgctggttcctataaagattggtcctattctggacaatctacacaactaggtatagaatttcttaagagaggtgataaaagtgtatattacactagtaatcctaccacattccacctagatggtgaagttatcacctttgacaatcttaagacacttctttctttgagagaagtgaggactattaaggtgtttacaacagtagacaacattaacctccacacgcaagttgtggacatgtcaatgacatatggacaacagtttggtccaacttatttggatggagctgatgttactaaaataaaacctcataattcacatgaaggtaaaacattttatgttttacctaatgatgacactctacgtgttgaggcttttgagtactaccacacaactgatcctagttttctgggtaggtacatgtcagcattaaatcacactaaaaagtggaaatacccacaagttaatggtttaacttctattaaatgggcagataacaactgttatcttgccactgcattgttaacactccaacaaatagagttgaagtttaatccacctgctctacaagatgcttattacagagcaagggctggtgaagctgctaacttttgtgcacttatcttagcctactgtaataagacagtaggtgagttaggtgatgttagagaaacaatgagttacttgtttcaacatgccaatttagattcttgcaaaagagtcttgaacgtggtgtgtaaaacttgtggacaacagcagacaacccttaagggtgtagaagctgttatgtacatgggcacactttcttatgaacaatttaagaaaggtgttcagataccttgtacgtgtggtaaacaagctacaaaatatctagtacaacaggagtcaccttttgttatgatgtcagcaccacctgctcagtatgaacttaagcatggtacatttacttgtgctagtgagtacactggtaattaccagtgtggtcactataaacatataacttctaaagaaactttgtattgcatagacggtgctttacttacaaagtcctcagaatacaaaggtcctattacggatgttttctacaaagaaaacagttacacaacaaccataaaaccagttacttataaattggatggtgttgtttgtacagaaattgaccctaagttggacaattattataagaaagacaattcttatttcacagagcaaccaattgatcttgtaccaaaccaaccatatccaaacgcaagcttcgataattttaagtttgtatgtgataatatcaaatttgctgatgatttaaaccagttaactggttataagaaacctgcttcaagagagcttaaagttacatttttccctgacttaaatggtgatgtggtggctattgattataaacactacacaccctcttttaagaaaggagctaaattgttacataaacctattgtttggcatgttaacaatgcaactaataaagccacgtataaaccaaatacctggtgtatacgttgtctttggagcacaaaaccagttgaaacatcaaattcgtttgatgtactgaagtcagaggacgcgcagggaatggataatcttgcctgcgaagatctaaaaccagtctctgaagaagtagtggaaaatcctaccatacagaaagacgttcttgagtgtaatgtgaaaactaccgaagttgtaggagacattatacttaaaccagcaaataatagtttaaaaattacagaagaggttggccacacagatctaatggctgcttatgtagacaattctagtcttactattaagaaacctaatgaattatctagagtattaggtttgaaaacccttgctattcatggtttagctgctgttaatagtgtcccttgggatactatagctaattatgctaagccttttcttaacaaagttgttagtacaactactaacatagttacacggtgtttaaaccgtgtttgtactaattatatgccttatttctttactttattgctacaattgtgtacttttactagaagtacaaattctagaattaaagcatctatgccgactactatagcaaagaatactgttaagagtgtcggtaaattttgtctagaggcttcatttaattatttgaagtcacctaatttttctaaactgataaatattataatttggtttttactattaagtgtttgcctaggttctttaatctactcaaccgctgctttaggtgttttaatgtctaatttaggcatgccttcttactgtactggttacagagaaggctatttgaactctactaatgtcactattgcaacctactgtactggttctataccttgtagtgtttgtcttagtggtttagattctttagacacctatccttctttagaaactatacaaattaccatttcatcttttaaatgggatttaactgcttttggcttagttgcagagtggtttttggcatatattcttttcactaggtttttctatgtacttggattggctgcaatcatgcaattgtttttcagctattttgcagtacattttattagtaattcttggcttatgtggttaataattaatcttgtacaaatggccccgatttcagctatggttagaatgtacatcttctttgcatcattttattatgtatggaaaagttatgtgcatgttgtagacggttgtaattcatcaacttgtatgatgtgttacaaacgtaatagagcaacaagagtcgaatgtacaactattgttaatggtgttagaaggtccttttatgtctatgctaatggaggtaaaggcttttgcaaactacacaattggaattgtgttaattgtgatacattctgtgctggtagtacatttattagtgatgaagttgcgagagacttgtcactacagtttaaaagaccaataaatcctactgaccagtcttcttacatcgttgatagtgttacagtgaagaatggttccatccatctttactttgataaagctggtcaaaagacttatgaaagacattctctctctcattttgttaacttagacaacctgagagctaataacactaaaggttcattgcctattaatgttatagtttttgatggtaaatcaaaatgtgaagaatcatctgcaaaatcagcgtctgtttactacagtcagcttatgtgtcaacctatactgttactagatcaggcattagtgtctgatgttggtgatagtgcggaagttgcagttaaaatgtttgatgcttacgttaatacgttttcatcaacttttaacgtaccaatggaaaaactcaaaacactagttgcaactgcagaagctgaacttgcaaagaatgtgtccttagacaatgtcttatctacttttatttcagcagctcggcaagggtttgttgattcagatgtagaaactaaagatgttgttgaatgtcttaaattgtcacatcaatctgacatagaagttactggcgatagttgtaataactatatgctcacctataacaaagttgaaaacatgacaccccgtgaccttggtgcttgtattgactgtagtgcgcgtcatattaatgcgcaggtagcaaaaagtcacaacattgctttgatatggaacgttaaagatttcatgtcattgtctgaacaactacgaaaacaaatacgtagtgctgctaaaaagaataacttaccttttaagttgacatgtgcaactactagacaagttgttaatgttgtaacaacaaagatagcacttaagggtggtaaaattgttaataattggttgaagcagttaattaaagttacacttgtgttcctttttgttgctgctattttctatttaataacacctgttcatgtcatgtctaaacatactgacttttcaagtgaaatcataggatacaaggctattgatggtggtgtcactcgtgacatagcatctacagatacttgttttgctaacaaacatgctgattttgacacatggtttagccagcgtggtggtagttatactaatgacaaagcttgcccattgattgctgcagtcataacaagagaagtgggttttgtcgtgcctggtttgcctggcacgatattacgcacaactaatggtgactttttgcatttcttacctagagtttttagtgcagttggtaacatctgttacacaccatcaaaacttatagagtacactgactttgcaacatcagcttgtgttttggctgctgaatgtacaatttttaaagatgcttctggtaagccagtaccatattgttatgataccaatgtactagaaggttctgttgcttatgaaagtttacgccctgacacacgttatgtgctcatggatggctctattattcaatttcctaacacctaccttgaaggttctgttagagtggtaacaacttttgattctgagtactgtaggcacggcacttgtgaaagatcagaagctggtgtttgtgtatctactagtggtagatgggtacttaacaatgattattacagatctttaccaggagttttctgtggtgtagatgctgtaaatttacttactaatatgtttacaccactaattcaacctattggtgctttggacatatcagcatctatagtagctggtggtattgtagctatcgtagtaacatgccttgcctactattttatgaggtttagaagagcttttggtgaatacagtcatgtagttgcctttaatactttactattccttatgtcattcactgtactctgtttaacaccagtttactcattcttacctggtgtttattctgttatttacttgtacttgacattttatcttactaatgatgtttcttttttagcacatattcagtggatggttatgttcacacctttagtacctttctggataacaattgcttatatcatttgtatttccacaaagcatttctattggttctttagtaattacctaaagagacgtgtagtctttaatggtgtttcctttagtacttttgaagaagctgcgctgtgcacctttttgttaaataaagaaatgtatctaaagttgcgtagtgatgtgctattacctcttacgcaatataatagatacttagctctttataataagtacaagtattttagtggagcaatggatacaactagctacagagaagctgcttgttgtcatctcgcaaaggctctcaatgacttcagtaactcaggttctgatgttctttaccaaccaccacaaacctctatcacctcagctgttttgcagagtggttttagaaaaatggcattcccatctggtaaagttgagggttgtatggtacaagtaacttgtggtacaactacacttaacggtctttggcttgatgacgtagtttactgtccaagacatgtgatctgcacctctgaagacatgcttaaccctaattatgaagatttactcattcgtaagtctaatcataatttcttggtacaggctggtaatgttcaactcagggttattggacattctatgcaaaattgtgtacttaagcttaaggttgatacagccaatcctaagacacctaagtataagtttgttcgcattcaaccaggacagactttttcagtgttagcttgttacaatggttcaccatctggtgtttaccaatgtgctatgaggcccaatttcactattaagggttcattccttaatggttcatgtggtagtgttggttttaacatagattatgactgtgtctctttttgttacatgcaccatatggaattaccaactggagttcatgctggcacagacttagaaggtaacttttatggaccttttgttgacaggcaaacagcacaagcagctggtacggacacaactattacagttaatgttttagcttggttgtacgctgctgttataaatggagacaggtggtttctcaatcgatttaccacaactcttaatgactttaaccttgtggctatgaagtacaattatgaacctctaacacaagaccatgttgacatactaggacctctttctgctcaaactggaattgccgttttagatatgtgtgcttcattaaaagaattactgcaaaatggtatgaatggacgtaccatattgggtagtgctttattagaagatgaatttacaccttttgatgttgttagacaatgctcaggtgttactttccaaagtgcagtgaaaagaacaatcaagggtacacaccactggttgttactcacaattttgacttcacttttagttttagtccagagtactcaatggtctttgttcttttttttttatgaaaatgcctttttaccttttgctatgggtattattgctatgtctgcttttgcaatgatgtttgtcaaacataagcatgcatttctctgtttgtttttgttaccttctcttgccactgtagcttattttaatatggtctatatgcctgctagttgggtgatgcgtattatgacatggttggatatggttgatactagtttgtctggttttaagctaaaagactgtgttatgtatgcatcagctgtagtgttactaatccttatgacagcaagaactgtgtatgatgatggtgctaggagagtgtggacacttatgaatgtcttgacactcgtttataaagtttattatggtaatgctttagatcaagccatttccatgtgggctcttataatctctgttacttctaactactcaggtgtagttacaactgtcatgtttttggccagaggtattgtttttatgtgtgttgagtattgccctattttcttcataactggtaatacacttcagtgtataatgctagtttattgtttcttaggctatttttgtacttgttactttggcctcttttgtttactcaaccgctactttagactgactcttggtgtttatgattacttagtttctacacaggagtttagatatatgaattcacagggactattcccacccaagaatagcatagatgccttcaaactcaacattaaattgttgggtgttggtggcaaaccttgtatcaaagtagccactgtacagtctaaaatgtcagatgtaaagtgcacatcagtagtcttactctcagttttgcaacaactcagagtagaatcatcatctaaattgtgggctcaatgtgtccagttacacaatgatattctcttagctaaagatactactgaagcctttgaaaaaatggtttcactactttctgttttgctttccatgcagggtgctgtagacataaacaagctttgtgaagaaatgctggacaacagggcaaccttacaagctatagcctcagagtttagttcccttccatcatatgcagcttttgctactgctcaagaagcttatgagcaggctgttgctaatggtgattctgaagttgttcttaaaaagttgaagaagtctttgaatgtggctaaatctgaatttgaccgtgatgcagccatgcaacgtaagttggaaaagatggctgatcaagctatgacccaaatgtataaacaggctagatctgaggacaagagggcaaaagttactagtgctatgcagacaatgcttttcactatgcttagaaagttggataatgatgcactcaacaacattatcaacaatgcaagagatggttgtgttcccttgaacataatacctcttacaacagcagccaaactaatggttgtcataccagactataacacatataaaaatacgtgtgatggtacaacatttacttatgcatcagcattgtgggaaatccaacaggttgtagatgcagatagtaaaattgttcaacttagtgaaattagtatggacaattcacctaatttagcatggcctcttattgtaacagctttaagggccaattctgctgtcaaattacagaataatgagcttagtcctgttgcactacgacagatgtcttgtgctgccggtactacacaaactgcttgcactgatgacaatgcgttagcttactacaacacaacaaagggaggtaggtttgtacttgcactgttatccgatttacaggatttgaaatgggctagattccctaagagtgatggaactggtactatctatacagaactggaaccaccttgtaggtttgttacagacacacctaaaggtcctaaagtgaagtatttatactttattaaaggattaaacaacctaaatagaggtatggtacttggtagtttagctgccacagtacgtctacaagctggtaatgcaacagaagtgcctgccaattcaactgtattatctttctgtgcttttgctgtagatgctgctaaagcttacaaagattatctagctagtgggggacaaccaatcactaattgtgttaagatgttgtgtacacacactggtactggtcaggcaataacagttacaccggaagccaatatggatcaagaatcctttggtggtgcatcgtgttgtctgtactgccgttgccacatagatcatccaaatcctaaaggattttgtgacttaaaaggtaagtatgtacaaatacctacaacttgtgctaatgaccctgtgggttttacacttaaaaacacagtctgtaccgtctgcggtatgtggaaaggttatggctgtagttgtgatcaactccgcgaacccatgcttcagtcagctgatgcacaatcgtttttaaacgggtttgcggtgtaagtgcagcccgtcttacaccgtgcggcacaggcactagtactgatgtcgtatacagggcttttgacatctacaatgataaagtagctggttttgctaaattcctaaaaactaattgttgtcgcttccaagaaaaggacgaagatgacaatttaattgattcttactttgtagttaagagacacactttctctaactaccaacatgaagaaacaatttataatttacttaaggattgtccagctgttgctaaacatgacttctttaagtttagaatagacggtgacatggtaccacatatatcacgtcaacgtcttactaaatacacaatggcagacctcgtctatgctttaaggcattttgatgaaggtaattgtgacacattaaaagaaatacttgtcacatacaattgttgtgatgatgattatttcaataaaaaggactggtatgattttgtagaaaacccagatatattacgcgtatacgccaacttaggtgaacgtgtacgccaagctttgttaaaaacagtacaattctgtgatgccatgcgaaatgctggtattgttggtgtactgacattagataatcaagatctcaatggtaactggtatgatttcggtgatttcatacaaaccacgccaggtagtggagttcctgttgtagattcttattattcattgttaatgcctatattaaccttgaccagggctttaactgcagagtcacatgttgacactgacttaacaaagccttacattaagtgggatttgttaaaatatgacttcacggaagagaggttaaaactctttgaccgttattttaaatattgggatcagacataccacccaaattgtgttaactgtttggatgacagatgcattctgcattgtgcaaactttaatgttttattctctacagtgttcccacctacaagttttggaccactagtgagaaaaatatttgttgatggtgttccatttgtagtttcaactggataccacttcagagagctaggtgttgtacataatcaggatgtaaacttacatagctctagacttagttttaaggaattacttgtgtatgctgctgaccctgctatgcacgctgcttctggtaatctattactagataaacgcactacgtgcttttcagtagctgcacttactaacaatgttgcttttcaaactgtcaaacccggtaattttaacaaagacttctatgactttgctgtgtctaagggtttctttaaggaaggaagttctgttgaattaaaacacttcttctttgctcaggatggtaatgctgctatcagcgattatgactactatcgttataatctaccaacaatgtgtgatatcagacaactactatttgtagttgaagttgttgataagtactttgattgttacgatggtggctgtattaatgctaaccaagtcatcgtcaacaacctagacaaatcagctggttttccatttaataaatggggtaaggctagactttattatgattcaatgagttatgaggatcaagatgcacttttcgcatatacaaaacgtaatgtcatccctactataactcaaatgaatcttaagtatgccattagtgcaaagaatagagctcgcaccgtagctggtgtctctatctgtagtactatgaccaatagacagtttcatcaaaaattattgaaatcaatagccgccactagaggagctactgtagtaattggaacaagcaaattctatggtggttggcacaacatgttaaaaactgtttatagtgatgtagaaaaccctcaccttatgggttgggattatcctaaatgtgatagagccatgcctaacatgcttagaattatggcctcacttgttcttgctcgcaaacatacaacgtgttgtagcttgtcacaccgtttctatagattagctaatgagtgtgctcaagtattgagtgaaatggtcatgtgtggcggttcactatatgttaaaccaggtggaacctcatcaggagatgccacaactgcttatgctaatagtgtttttaacatttgtcaagctgtcacggccaatgttaatgcacttttatctactgatggtaacaaaattgccgataagtatgtccgcaatttacaacacagactttatgagtgtctctatagaaatagagatgttgacacagactttgtgaatgagttttacgcatatttgcgtaaacatttctcaatgatgatactctctgacgatgctgttgtgtgtttcaatagcacttatgcatctcaaggtctagtggctagcataaagaactttaagtcagttctttattatcaaaacaatgtttttatgtctgaagcaaaatgttggactgagactgaccttactaaaggacctcatgaattttgctctcaacatacaatgctagttaaacagggtgatgattatgtgtaccttccttacccagatccatcaagaatcctaggggccggctgttttgtagatgatatcgtaaaaacagatggtacacttatgattgaacggttcgtgtctttagctatagatgcttacccacttactaaacatcctaatcaggagtatgctgatgtctttcatttgtacttacaatacataagaaagctacatgatgagttaacaggacacatgttagacatgtattctgttatgcttactaatgataacacttcaaggtattgggaacctgagttttatgaggctatgtacacaccgcatacagtcttacaggctgttggggcttgtgttctttgcaattcacagacttcattaagatgtggtgcttgcatacgtagaccattcttatgttgtaaatgctgttacgaccatgtcatatcaacatcacataaattagtcttgtctgttaatccgtatgtttgcaatgctccaggttgtgatgtcacagatgtgactcaactttacttaggaggtatgagctattattgtaaatcacataaaccacccattagttttccattgtgtgctaatggacaagtttttggtttatataaaaatacatgtgttggtagcgataatgttactgactttaatgcaattgcaacatgtgactggacaaatgctggtgattacattttagctaacacctgtactgaaagactcaagctttttgcagcagaaacgctcaaagctactgaggagacatttaaactgtcttatggtattgctactgtacgtgaagtgctgtctgacagagaattacatctttcatgggaagttggtaaacctagaccaccacttaaccgaaattatgtctttactggttatcgtgtaactaaaaacagtaaagtacaaataggagagtacacctttgaaaaaggtgactatggtgatgctgttgtttaccgaggtacaacaacttacaaattaaatgttggtgattattttgtgctgacatcacatacagtaatgccattaagtgcacctacactagtgccacaagagcactatgttagaattactggcttatacccaacactcaatatctcagatgagttttctagcaatgttgcaaattatcaaaaggttggtatgcaaaagtattctacactccagggaccacctggtactggtaagagtcattttgctattggcctagctctctactacccttctgctcgcatagtgtatacagcttgctctcatgccgctgttgatgcactatgtgagaaggcattaaaatatttgcctatagataaatgtagtagaattatacctgcacgtgctcgtgtagagtgttttgataaattcaaagtgaattcaacattagaacagtatgtcttttgtactgtaaatgcattgcctgagacgacagcagatatagttgtctttgatgaaatttcaatggccacaaattatgatttgagtgttgtcaatgccagattacgtgctaagcactatgtgtacattggcgaccctgctcaattacctgcaccacgcacattgctaactaagggcacactagaaccagaatatttcaattcagtgtgtagacttatgaaaactataggtccagacatgttcctcggaacttgtcggcgttgtcctgctgaaattgttgacactgtgagtgctttggtttatgataataagcttaaagcacataaagacaaatcagctcaatgctttaaaatgttttataagggtgttatcacgcatgatgtttcatctgcaattaacaggccacaaataggcgtggtaagagaattccttacacgtaaccctgcttggagaaaagctgtctttatttcaccttataattcacagaatgctgtagcctcaaagattttgggactaccaactcaaactgttgattcatcacagggctcagaatatgactatgtcatattcactcaaaccactgaaacagctcactcttgtaatgtaaacagatttaatgttgctattaccagagcaaaagtaggcatactttgcataatgtctgatagagacctttatgacaagttgcaatttacaagtcttgaaattccacgtaggaatgtggcaactttacaagctgaaaatgtaacaggactctttaaagattgtagtaaggtaatcactgggttacatcctacacaggcacctacacacctcagtgttgacactaaattcaaaactgaaggtttatgtgttgacatacctggcatacctaaggacatgacctatagaagactcatctctatgatgggttttaaaatgaattatcaagttaatggttaccctaacatgtttatcacccgcgaagaagctataagacatgtacgtgcatggattggcttcgatgtcgaggggtgtcatgctactagagaagctgttggtaccaatttacctttacagctaggtttttctacaggtgttaacctagttgctgtacctacaggttatgttgatacacctaataatacagatttttccagagttagtgctaaaccaccgcctggagatcaatttaaacacctcataccacttatgtacaaaggacttccttggaatgtagtgcgtataaagattgtacaaatgttaagtgacacacttaaaaatctctctgacagagtcgtatttgtcttatgggcacatggctttgagttgacatctatgaagtattttgtgaaaataggacctgagcgcacctgttgtctatgtgatagacgtgccacatgcttttccactgcttcagacacttatgcctgttggcatcattctattggatttgattacgtctataatccgtttatgattgatgttcaacaatggggttttacaggtaacctacaaagcaaccatgatctgtattgtcaagtccatggtaatgcacatgtagctagttgtgatgcaatcatgactaggtgtctagctgtccacgagtgctttgttaagcgtgttgactggactattgaatatcctataattggtgatgaactgaagattaatgcggcttgtagaaaggttcaacacatggttgttaaagctgcattattagcagacaaattcccagttcttcacgacattggtaaccctaaagctattaagtgtgtacctcaagctgatgtagaatggaagttctatgatgcacagccttgtagtgacaaagcttataaaatagaagaattattctattcttatgccacacattctgacaaattcacagatggtgtatgcctattttggaattgcaatgtcgatagatatcctgctaattccattgtttgtagatttgacactagagtgctatctaaccttaacttgcctggttgtgatggtggcagtttgtatgtaaataaacatgcattccacacaccagcttttgataaaagtgcttttgttaatttaaaacaattaccatttttctattactctgacagtccatgtgagtctcatggaaaacaagtagtgtcagatatagattatgtaccactaaagtctgctacgtgtataacacgttgcaatttaggtggtgctgtctgtagacatcatgctaatgagtacagattgtatctcgatgcttataacatgatgatctcagctggctttagcttgtgggtttacaaacaatttgatacttataacctctggaacacttttacaagacttcagagtttagaaaatgtggcttttaatgttgtaaataagggacactttgatggacaacagggtgaagtaccagtttctatcattaataacactgtttacacaaaagttgatggtgttgatgtagaattgtttgaaaataaaacaacattacctgttaatgtagcatttgagctttgggctaagcgcaacattaaaccagtaccagaggtgaaaatactcaataatttgggtgtggacattgctgctaatactgtgatctgggactacaaaagagatgctccagcacatatatctactattggtgtttgttctatgactgacatagccaagaaaccaactgaaacgatttgtgcaccactcactgtcttttttgatggtagagttgatggtcaagtagacttatttagaaatgcccgtaatggtgttcttattacagaaggtagtgttaaaggtttacaaccatctgtaggtcccaaacaagctagtcttaatggagtcacattaattggagaagccgtaaaaacacagttcaattattataagaaagttgatggtgttgtccaacaattacctgaaacttactttactcagagtagaaatttacaagaatttaaacccaggagtcaaatggaaattgatttcttagaattagctatggatgaattcattgaacggtataaattagaaggctatgccttcgaacatatcgtttatggagattttagtcatagtcagttaggtggtttacatctactgattggactagctaaacgttttaaggaatcaccttttgaattagaagattttattcctatggacagtacagttaaaaactatttcataacagatgcgcaaacaggttcatctaagtgtgtgtgttctgttattgatttattacttgatgattttgttgaaataataaaatcccaagatttatctgtagtttctaaggttgtcaaagtgactattgactatacagaaatttcatttatgctttggtgtaaagatggccatgtagaaacattttacccaaaattacaatctagtcaagcgtggcaaccgggtgttgctatgcctaatctttacaaaatgcaaagaatgctattagaaaagtgtgaccttcaaaattatggtgatagtgcaacattacctaaaggcataatgatgaatgtcgcaaaatatactcaactgtgtcaatatttaaacacattaacattagctgtaccctataatatgagagttatacattttggtgctggttctgataaaggagttgcaccaggtacagctgttttaagacagtggttgcctacgggtacgctgcttgtcgattcagatcttaatgactttgtctctgatgcagattcaactttgattggtgattgtgcaactgtacatacagctaataaatgggatctcattattagtgatatgtacgaccctaagactaaaaatgttacaaaagaaaatgactctaaagagggttttttcacttacatttgtgggtttatacaacaaaagctagctcttggaggttccgtggctataaagataacagaacattcttggaatgctgatctttataagctcatgggacacttcgcatggtggacagcctttgttactaatgtgaatgcgtcatcatctgaagcatttttaattggatgtaattatcttggcaaaccacgcgaacaaatagatggttatgtcatgcatgcaaattacatattttggaggaatacaaatccaattcagttgtcttcctattctttatttgacatgagtaaatttccccttaaattaaggggtactgctgttatgtctttaaaagaaggtcaaatcaatgatatgattttatctcttcttagtaaaggtagacttataattagagaaaacaacagagttgttatttctagtgatgttcttgttaacaactaaacgaacaatgtttgtttttcttgttttattgccactagtctctagtcagtgtgttaatcttacaaccagaactcaattaccccctgcatacactaattctttcacacgtggtgtttattaccctgacaaagttttcagatcctcagttttacattcaactcaggacttgttcttacctttcttttccaatgttacttggttccatgctatacatgtctctgggaccaatggtactaagaggtttgataaccctgtcctaccatttaatgatggtgtttattttgcttccactgagaagtctaacataataagaggctggatttttggtactactttagattcgaagacccagtccctacttattgttaataacgctactaatgttgttattaaagtctgtgaatttcaattttgtaatgatccatttttgggtgtttattaccacaaaaacaacaaaagttggatggaaagtgagttcagagtttattctagtgcgaataattgcacttttgaatatgtctctcagccttttcttatggaccttgaaggaaaacagggtaatttcaaaaatcttagggaatttgtgtttaagaatattgatggttattttaaaatatattctaagcacacgcctattaatttagtgcgtgatctccctcagggtttttcggctttagaaccattggtagatttgccaataggtattaacatcactaggtttcaaactttacttgctttacatagaagttatttgactcctggtgattcttcttcaggttggacagctggtgctgcagcttattatgtgggttatcttcaacctaggacttttctattaaaatataatgaaaatggaaccattacagatgctgtagactgtgcacttgaccctctctcagaaacaaagtgtacgttgaaatccttcactgtagaaaaaggaatctatcaaacttctaactttagagtccaaccaacagaatctattgttagatttcctaatattacaaacttgtgcccttttggtgaagtttttaacgccaccagatttgcatctgtttatgcttggaacaggaagagaatcagcaactgtgttgctgattattctgtcctatataattccgcatcattttccacttttaagtgttatggagtgtctcctactaaattaaatgatctctgctttactaatgtctatgcagattcatttgtaattagaggtgatgaagtcagacaaatcgctccagggcaaactggaaagattgctgattataattataaattaccagatgattttacaggctgcgttatagcttggaattctaacaatcttgattctaaggttggtggtaattataattacctgtatagattgtttaggaagtctaatctcaaaccttttgagagagatatttcaactgaaatctatcaggccggtagcacaccttgtaatggtgttgaaggttttaattgttactttcctttacaatcatatggtttccaacccactaatggtgttggttaccaaccatacagagtagtagtactttcttttgaacttctacatgcaccagcaactgtttgtggacctaaaaagtctactaatttggttaaaaacaaatgtgtcaatttcaacttcaatggtttaacaggcacaggtgttcttactgagtctaacaaaaagtttctgcctttccaacaatttggcagagacattgctgacactactgatgctgtccgtgatccacagacacttgagattcttgacattacaccatgttcttttggtggtgtcagtgttataacaccaggaacaaatacttctaaccaggttgctgttctttatcaggatgttaactgcacagaagtccctgttgctattcatgcagatcaacttactcctacttggcgtgtttattctacaggttctaatgtttttcaaacacgtgcaggctgtttaataggggctgaacatgtcaacaactcatatgagtgtgacatacccattggtgcaggtatatgcgctagttatcagactcagactaattctcctcggcgggcacgtagtgtagctagtcaatccatcattgcctacactatgtcacttggtgcagaaaattcagttgcttactctaataactctattgccatacccacaaattttactattagtgttaccacagaaattctaccagtgtctatgaccaagacatcagtagattgtacaatgtacatttgtggtgattcaactgaatgcagcaatcttttgttgcaatatggcagtttttgtacacaattaaaccgtgctttaactggaatagctgttgaacaagacaaaaacacccaagaagtttttgcacaagtcaaacaaatttacaaaacaccaccaattaaagattttggtggttttaatttttcacaaatattaccagatccatcaaaaccaagcaagaggtcatttattgaagatctacttttcaacaaagtgacacttgcagatgctggcttcatcaaacaatatggtgattgccttggtgatattgctgctagagacctcatttgtgcacaaaagtttaacggccttactgttttgccacctttgctcacagatgaaatgattgctcaatacacttctgcactgttagcgggtacaatcacttctggttggacctttggtgcaggtgctgcattacaaataccatttgctatgcaaatggcttataggtttaatggtattggagttacacagaatgttctctatgagaaccaaaaattgattgccaaccaatttaatagtgctattggcaaaattcaagactcactttcttccacagcaagtgcacttggaaaacttcaagatgtggtcaaccaaaatgcacaagctttaaacacgcttgttaaacaacttagctccaattttggtgcaatttcaagtgttttaaatgatatcctttcacgtcttgacaaagttgaggctgaagtgcaaattgataggttgatcacaggcagacttcaaagtttgcagacatatgtgactcaacaattaattagagctgcagaaatcagagcttctgctaatcttgctgctactaaaatgtcagagtgtgtacttggacaatcaaaaagagttgatttttgtggaaagggctatcatcttatgtccttccctcagtcagcacctcatggtgtagtcttcttgcatgtgacttatgtccctgcacaagaaaagaacttcacaactgctcctgccatttgtcatgatggaaaagcacactttcctcgtgaaggtgtctttgtttcaaatggcacacactggtttgtaacacaaaggaatttttatgaaccacaaatcattactacagacaacacatttgtgtctggtaactgtgatgttgtaataggaattgtcaacaacacagtttatgatcctttgcaacctgaattagactcattcaaggaggagttagataaatattttaagaatcatacatcaccagatgttgatttaggtgacatctctggcattaatgcttcagttgtaaacattcaaaaagaaattgaccgcctcaatgaggttgccaagaatttaaatgaatctctcatcgatctccaagaacttggaaagtatgagcagtatataaaatggccatggtacatttggctaggttttatagctggcttgattgccatagtaatggtgacaattatgctttgctgtatgaccagttgctgtagttgtctcaagggctgttgttcttgtggatcctgctgcaaatttgatgaagacgactctgagccagtgctcaaaggagtcaaattacattacacataaacgaacttatggatttgtttatgagaatcttcacaattggaactgtaactttgaagcaaggtgaaatcaaggatgctactccttcagattttgttcgcgctactgcaacgataccgatacaagcctcactccctttcggatggcttattgttggcgttgcacttcttgctgtttttcagagcgcttccaaaatcataaccctcaaaaagagatggcaactagcactctccaagggtgttcactttgtttgcaacttgctgttgttgtttgtaacagtttactcacaccttttgctcgttgctgctggccttgaagccccttttctctatctttatgctttagtctacttcttgcagagtataaactttgtaagaataataatgaggctttggctttgctggaaatgccgttccaaaaacccattactttatgatgccaactattttctttgctggcatactaattgttacgactattgtataccttacaatagtgtaacttcttcaattgtcattacttcaggtgatggcacaacaagtcctatttctgaacatgactaccagattggtggttatactgaaaaatgggaatctggagtaaaagactgtgttgtattacacagttacttcacttcagactattaccagctgtactcaactcaattgagtacagacactggtgttgaacatgttaccttcttcatctacaataaaattgttgatgagcctgaagaacatgtccaaattcacacaatcgacggttcatccggagttgttaatccagtaatggaaccaatttatgatgaaccgacgacgactactagcgtgcctttgtaagcacaagctgatgagtacgaacttatgtactcattcgtttcggaagagacaggtacgttaatagttaatagcgtacttctttttcttgctttcgtggtattcttgctagttacactagccatccttactgcgcttcgattgtgtgcgtactgctgcaatattgttaacgtgagtcttgtaaaaccttctttttacgtttactctcgtgttaaaaatctgaattcttctagagttcctgatcttctggtctaaacgaactaaatattatattagtttttctgtttggaactttaattttagccatggcagattccaacggtactattaccgttgaagagcttaaaaagctccttgaacaatggaacctagtaataggtttcctattccttacatggatttgtcttctacaatttgcctatgccaacaggaataggtttttgtatataattaagttaattttcctctggctgttatggccagtaactttagcttgttttgtgcttgctgctgtttacagaataaattggatcaccggtggaattgctatcgcaatggcttgtcttgtaggcttgatgtggctcagctacttcattgcttctttcagactgtttgcgcgtacgcgttccatgtggtcattcaatccagaaactaacattcttctcaacgtgccactccatggcactattctgaccagaccgcttctagaaagtgaactcgtaatcggagctgtgatccttcgtggacatcttcgtattgctggacaccatctaggacgctgtgacatcaaggacctgcctaaagaaatcactgttgctacatcacgaacgctttcttattacaaattgggagcttcgcagcgtgtagcaggtgactcaggttttgctgcatacagtcgctacaggattggcaactataaattaaacacagaccattccagtagcagtgacaatattgctttgcttgtacagtaagtgacaacagatgtttcatctcgttgactttcaggttactatagcagagatattactaattattatgaggacttttaaagtttccatttggaatcttgattacatcataaacctcataattaaaaatttatctaagtcactaactgagaataaatattctcaattagatgaagagcaaccaatggagattgattaaacgaacatgaaaattattcttttcttggcactgataacactcgctacttgtgagctttatcactaccaagagtgtgttagaggtacaacagtacttttaaaagaaccttgctcttctggaacatacgagggcaattcaccatttcatcctctagctgataacaaatttgcactgacttgctttagcactcaatttgcttttgcttgtcctgacggcgtaaaacacgtctatcagttacgtgccagatcagtttcacctaaactgttcatcagacaagaggaagttcaagaactttactctccaatttttcttattgttgcggcaatagtgtttataacactttgcttcacactcaaaagaaagacagaatgattgaactttcattaattgacttctatttgtgctttttagcctttctgctattccttgttttaattatgcttattatcttttggttctcacttgaactgcaagatcataatgaaacttgtcacgcctaaacgaacatgaaatttcttgttttcttaggaatcatcacaactgtagctgcatttcaccaagaatgtagtttacagtcatgtactcaacatcaaccatatgtagttgatgacccgtgtcctattcacttctattctaaatggtatattagagtaggagctagaaaatcagcacctttaattgaattgtgcgtggatgaggctggttctaaatcacccattcagtacatcgatatcggtaattatacagtttcctgtttaccttttacaattaattgccaggaacctaaattgggtagtcttgtagtgcgttgttcgttctatgaagactttttagagtatcatgacgttcgtgttgttttagatttcatctaaacgaacaaactaaaatgtctgataatggaccccaaaatcagcgaaatgcaccccgcattacgtttggtggaccctcagattcaactggcagtaaccagaatggagaacgcagtggggcgcgatcaaaacaacgtcggccccaaggtttacccaataatactgcgtcttggttcaccgctctcactcaacatggcaaggaagaccttaaattccctcgaggacaaggcgttccaattaacaccaatagcagtccagatgaccaaattggctactaccgaagagctaccagacgaattcgtggtggtgacggtaaaatgaaagatctcagtccaagatggtatttctactacctaggaactgggccagaagctggacttccctatggtgctaacaaagacggcatcatatgggttgcaactgagggagccttgaatacaccaaaagatcacattggcacccgcaatcctgctaacaatgctgcaatcgtgctacaacttcctcaaggaacaacattgccaaaaggcttctacgcagaagggagcagaggcggcagtcaagcctcttctcgttcctcatcacgtagtcgcaacagttcaagaaattcaactccaggcagcagtaggggaacttctcctgctagaatggctggcaatggcggtgatgctgctcttgctttgctgctgcttgacagattgaaccagcttgagagcaaaatgtctggtaaaggccaacaacaacaaggccaaactgtcactaagaaatctgctgctgaggcttctaagaagcctcggcaaaaacgtactgccactaaagcatacaatgtaacacaagctttcggcagacgtggtccagaacaaacccaaggaaattttggggaccaggaactaatcagacaaggaactgattacaaacattggccgcaaattgcacaatttgcccccagcgcttcagcgttcttcggaatgtcgcgcattggcatggaagtcacaccttcgggaacgtggttgacctacacaggtgccatcaaattggatgacaaagatccaaatttcaaagatcaagtcattttgctgaataagcatattgacgcatacaaaacattcccaccaacagagcctaaaaaggacaaaaagaagaaggctgatgaaactcaagccttaccgcagagacagaagaaacagcaaactgtgactcttcttcctgctgcagatttggatgatttctccaaacaattgcaacaatccatgagcagtgctgactcaactcaggcctaaactcatgcagaccacacaaggcagatgggctatataaacgttttcgcttttccgtttacgatatatagtctactcttgtgcagaatgaattctcgtaactacatagcacaagtagatgtagttaactttaatctcacatagcaatctttaatcagtgtgtaacattagggaggacttgaaagagccaccacattttcaccgaggccacgcggagtacgatcgagtgtacagtgaacaatgctagggagagctgcctatatggaagagccctaatgtgtaaaattaattttagtagtgctatccccatgtgattttaatagcttcttaggagaatgacaaaaaaaaaaaa

SEQ ID NO: 8 - DNA, 29782 bp, SARS-CoV-2
agatctgttctctaaacgaactttaaaatctgtgtggctgtcactcggctgcatgcttagtgcactcacgcagtataattaataactaattactgtcgttgacaggacacgagtaactcgtctatcttctgcaggctgcttacggtttcgtccgtgttgcagccgatcatcagcacatctaggtttcgtccgggtgtgaccgaaaggtaagatggagagccttgtccctggtttcaacgagaaaacacacgtccaactcagtttgcctgttttacaggttcgcgacgtgctcgtacgtggctttggagactccgtggaggaggtcttatcagaggcacgtcaacatcttaaagatggcacttgtggcttagtagaagttgaaaaaggcgttttgcctcaacttgaacagccctatgtgttcatcaaacgttcggatgctcgaactgcacctcatggtcatgttatggttgagctggtagcagaactcgaaggcattcagtacggtcgtagtggtgagacacttggtgtccttgtccctcatgtgggcgaaataccagtggcttaccgcaaggttcttcttcgtaagaacggtaataaaggagctggtggccatagttacggcgccgatctaaagtcatttgacttaggcgacgagcttggcactgatccttatgaagattttcaagaaaactggaacactaaacatagcagtggtgttacccgtgaactcatgcgtgagcttaacggaggggcatacactcgctatgtcgataacaacttctgtggccctgatggctaccctcttgagtgcattaaagaccttctagcacgtgctggtaaagcttcatgcactttgtccgaacaactggactttattgacactaagaggggtgtatactgctgccgtgaacatgagcatgaaattgcttggtacacggaacgttctgaaaagagctatgaattgcagacaccttttgaaattaaattggcaaagaaatttgacaccttcaatggggaatgtccaaattttgtatttcccttaaattccataatcaagactattcaaccaagggttgaaaagaaaaagcttgatggctttatgggtagaattcgatctgtctatccagttgcgtcaccaaatgaatgcaaccaaatgtgcctttcaactctcatgaagtgtgatcattgtggtgaaacttcatggcagacgggcgattttgttaaagccacttgcgaattttgtggcactgagaatttgactaaagaaggtgccactacttgtggttacttaccccaaaatgctgttgttaaaatttattgtccagcatgtcacaattcagaagtaggacctgagcatagtcttgccgaataccataatgaatctggcttgaaaaccattcttcgtaagggtggtcgcactattgcctttggaggctgtgtgttctcttatgttggttgccataacaagtgtgcctattgggttccacgtgctagcgctaacataggttgtaaccatacaggtgttgttggagaaggttccgaaggtcttaatgacaaccttcttgaaatactccaaaaagagaaagtcaacatcaatattgttggtgactttaaacttaatgaagagatcgccattattttggcatctttttctgcttccacaagtgcttttgtggaaactgtgaaaggtttggattataaagcattcaaacaaattgttgaatcctgtggtaattttaaagttacaaaaggaaaagctaaaaaaggtgcctggaatattggtgaacagaaatcaatactgagtcctctttatgcatttgcatcagaggctgctcgtgttgtacgatcaattttctcccgcactcttgaaactgctcaaaattctgtgcgtgttttacagaaggccgctataacaatactagatggaatttcacagtattcactgagactcattgatgctatgatgttcacatctgatttggctactaacaatctagttgtaatggcctacattacaggtggtgttgttcagttgacttcgcagtggctaactaacatctttggcactgtttatgaaaaactcaaacccgtccttgattggcttgaagagaagtttaaggaaggtgtagagtttcttagagacggttgggaaattgttaaatttatctcaacctgtgcttgtgaaattgtcggtggacaaattgtcacctgtgcaaaggaaattaaggagagtgttcagacattctttaagcttgtaaataaatttttggctttgtgtgctgactctatcattattggtggagctaaacttaaagccttgaatttaggtgaaacatttgtcacgcactcaaagggattgtacagaaagtgtgttaaatccagagaagaaactggcctactcatgcctctaaaagccccaaaagaaattatcttcttagagggagaaacacttcccacagaagtgttaacagaggaagttgtcttgaaaactggtgatttacaaccattagaacaacctactagtgaagctgttgaagctccattggttggtacaccagtttgtattaacgggcttatgttgctcgaaatcaaagacacagaaaagtactgtgcccttgcacctaatatgatggtaacaaacaataccttcacactcaaaggcggtgcaccaacaaaggttacttttggtgatgacactgtgatagaagtgcaaggttacaagagtgtgaatatcacttttgaacttgatgaaaggattgataaagtacttaatgagaagtgctctgcctatacagttgaactcggtacagaagtaaatgagttcgcctgtgttgtggcagatgctgtcataaaaactttgcaaccagtatctgaattacttacaccactgggcattgatttagatgagtggagtatggctacatactacttatttgatgagtctggtgagtttaaattggcttcacatatgtattgttctttctaccctccagatgaggatgaagaagaaggtgattgtgaagaagaagagtttgagccatcaactcaatatgagtatggtactgaagatgattaccaaggtaaacctttggaatttggtgccacttctgctgctcttcaacctgaagaagagcaagaagaagattggttagatgatgatagtcaacaaactgttggtcaacaagacggcagtgaggacaatcagacaactactattcaaacaattgttgaggttcaacctcaattagagatggaacttacaccagttgttcagactattgaagtgaatagttttagtggttatttaaaacttactgacaatgtatacattaaaaatgcagacattgtggaagaagctaaaaaggtaaaaccaacagtggttgttaatgcagccaatgtttaccttaaacatggaggaggtgttgcaggagccttaaataaggctactaacaatgccatgcaagttgaatctgatgattacatagctactaatggaccacttaaagtgggtggtagttgtgttttaagcggacacaatcttgctaaacactgtcttcatgttgtcggcccaaatgttaacaaaggtgaagacattcaacttcttaagagtgcttatgaaaattttaatcagcacgaagttctacttgcaccattattatcagctggtatttttggtgctgaccctatacattctttaagagtttgtgtagatactgttcgcacaaatgtctacttagctgtctttgataaaaatctctatgacaaacttgtttcaagctttttggaaatgaagagtgaaaagcaagttgaacaaaagatcgctgagattcctaaagaggaagttaagccatttataactgaaagtaaaccttcagttgaacagagaaaacaagatgataagaaaatcaaagcttgtgttgaagaagttacaacaactctggaagaaactaagttcctcacagaaaacttgttactttatattgacattaatggcaatcttcatccagattctgccactcttgttagtgacattgacatcactttcttaaagaaagatgctccatatatagtgggtgatgttgttcaagagggtgttttaactgctgtggttatacctactaaaaaggctggtggcactactgaaatgctagcgaaagctttgagaaaagtgccaacagacaattatataaccacttacccgggtcagggtttaaatggttacactgtagaggaggcaaagacagtgcttaaaaagtgtaaaagtgccttttacattctaccatctattatctctaatgagaagcaagaaattcttggaactgtttcttggaatttgcgagaaatgcttgcacatgcagaagaaacacgcaaattaatgcctgtctgtgtggaaactaaagccatagtttcaactatacagcgtaaatataagggtattaaaatacaagagggtgtggttgattatggtgctagattttacttttacaccagtaaaacaactgtagcgtcacttatcaacacacttaacgatctaaatgaaactcttgttacaatgccacttggctatgtaacacatggcttaaatttggaagaagctgctcggtatatgagatctctcaaagtgccagctacagtttctgtttcttcacctgatgctgttacagcgtataatggttatcttacttcttcttctaaaacacctgaagaacattttattgaaaccatctcacttgctggttcctataaagattggtcctattctggacaatctacacaactaggtatagaatttcttaagagaggtgataaaagtgtatattacactagtaatcctaccacattccacctagatggtgaagttatcacctttgacaatcttaagacacttctttctttgagagaagtgaggactattaaggtgtttacaacagtagacaacattaacctccacacgcaagttgtggacatgtcaatgacatatggacaacagtttggtccaacttatttggatggagctgatgttactaaaataaaacctcataattcacatgaaggtaaaacattttatgttttacctaatgatgacactctacgtgttgaggcttttgagtactaccacacaactgatcctagttttctgggtaggtacatgtcagcattaaatcacactaaaaagtggaaatacccacaagttaatggtttaacttctattaaatgggcagataacaactgttatcttgccactgcattgttaacactccaacaaatagagttgaagtttaatccacctgctctacaagatgcttattacagagcaagggctggtgaagctgctaacttttgtgcacttatcttagcctactgtaataagacagtaggtgagttaggtgatgttagagaaacaatgagttacttgtttcaacatgccaatttagattcttgcaaaagagtcttgaacgtggtgtgtaaaacttgtggacaacagcagacaacccttaagggtgtagaagctgttatgtacatgggcacactttcttatgaacaatttaagaaaggtgttcagataccttgtacgtgtggtaaacaagctacaaaatatctagtacaacaggagtcaccttttgttatgatgtcagcaccacctgctcagtatgaacttaagcatggtacatttacttgtgctagtgagtacactggtaattaccagtgtggtcactataaacatataacttctaaagaaactttgtattgcatagacggtgctttacttacaaagtcctcagaatacaaaggtcctattacggatgttttctacaaagaaaacagttacacaacaaccataaaaccagttacttataaattggatggtgttgtttgtacagaaattgaccctaagttggacaattattataagaaagacaattcttatttcacagagcaaccaattgatcttgtaccaaaccaaccatatccaaacgcaagcttcgataattttaagtttgtatgtgataatatcaaatttgctgatgatttaaaccagttaactggttataagaaacctgcttcaagagagcttaaagttacatttttccctgacttaaatggtgatgtggtggctattgattataaacactacacaccctcttttaagaaaggagctaaattgttacataaacctattgtttggcatgttaacaatgcaactaataaagccacgtataaaccaaatacctggtgtatacgttgtctttggagcacaaaaccagttgaaacatcaaattcgtttgatgtactgaagtcagaggacgcgcagggaatggataatcttgcctgcgaagatctaaaaccagtctctgaagaagtagtggaaaatcctaccatacagaaagacgttcttgagtgtaatgtgaaaactaccgaagttgtaggagacattatacttaaaccagcaaataatagtttaaaaattacagaagaggttggccacacagatctaatggctgcttatgtagacaattctagtcttactattaagaaacctaatgaattatctagagtattaggtttgaaaacccttgctactcatggtttagctgctgttaatagtgtcccttgggatactatagctaattatgctaagccttttcttaacaaagttgttagtacaactactaacatagttacacggtgtttaaaccgtgtttgtactaattatatgccttatttctttactttattgctacaattgtgtacttttactagaagtacaaattctagaattaaagcatctatgccgactactatagcaaagaatactgttaagagtgtcggtaaattttgtctagaggcttcatttaattatttgaagtcacctaatttttctaaactgataaatattataatttggtttttactattaagtgtttgcctaggttctttaatctactcaaccgctgctttaggtgttttaatgtctaatttaggcatgccttcttactgtactggttacagagaaggctatttgaactctactaatgtcactattgcaacctactgtactggttctataccttgtagtgtttgtcttagtggtttagattctttagacacctatccttctttagaaactatacaaattaccatttcatcttttaaatgggatttaactgcttttggcttagttgcagagtggtttttggcatatattcttttcactaggtttttctatgtacttggattggctgcaatcatgcaattgtttttcagctattttgcagtacattttattagtaattcttggcttatgtggttaataattaatcttgtacaaatggccccgatttcagctatggttagaatgtacatcttctttgcatcattttattatgtatggaaaagttatgtgcatgttgtagacggttgtaattcatcaacttgtatgatgtgttacaaacgtaatagagcaacaagagtcgaatgtacaactattgttaatggtgttagaaggtccttttatgtctatgctaatggaggtaaaggcttttgcaaactacacaattggaattgtgttaattgtgatacattctgtgctggtagtacatttattagtgatgaagttgcgagagacttgtcactacagtttaaaagaccaataaatcctactgaccagtcttcttacatcgttgatagtgttacagtgaagaatggttccatccatctttactttgataaagctggtcaaaagacttatgaaagacattctctctctcattttgttaacttagacaacctgagagctaataacactaaaggttcattgcctattaatgttatagtttttgatggtaaatcaaaatgtgaagaatcatctgcaaaatcagcgtctgtttactacagtcagcttatgtgtcaacctatactgttactagatcaggcattagtgtctgatgttggtgatagtgcggaagttgcagttaaaatgtttgatgcttacgttaatacgttttcatcaacttttaacgtaccaatggaaaaactcaaaacactagttgcaactgcagaagctgaacttgcaaagaatgtgtccttagacaatgtcttatctacttttatttcagcagctcggcaagggtttgttgattcagatgtagaaactaaagatgttgttgaatgtcttaaattgtcacatcaatctgacatagaagttactggcgatagttgtaataactatatgctcacctataacaaagttgaaaacatgacaccccgtgaccttggtgcttgtattgactgtagtgcgcgtcatattaatgcgcaggtagcaaaaagtcacaacattgctttgatatggaacgttaaagatttcatgtcattgtctgaacaactacgaaaacaaatacgtagtgctgctaaaaagaataacttaccttttaagttgacatgtgcaactactagacaagttgttaatgttgtaacaacaaagatagcacttaagggtggtaaaattgttaataattggttgaagcagttaattaaagttacacttgtgttcctttttgttgctgctattttctatttaataacacctgttcatgtcatgtctaaacatactgacttttcaagtgaaatcataggatacaaggctattgatggtggtgtcactcgtgacatagcatctacagatacttgttttgctaacaaacatgctgattttgacacatggtttagtcagcgtggtggtagttatactaatgacaaagcttgcccattgattgctgcagtcataacaagagaagtgggttttgtcgtgcctggtttgcctggcacgatattacgcacaactaatggtgactttttgcatttcttacctagagtttttagtgcagttggtaacatctgttacacaccatcaaaacttatagagtacactgactttgcaacatcagcttgtgttttggctgctgaatgtacaatttttaaagatgcttctggtaagccagtaccatattgttatgataccaatgtactagaaggttctgttgcttatgaaagtttacgccctgacacacgttatgtgctcatggatggctctattattcaatttcctaacacctaccttgaaggttctgttagagtggtaacaacttttgattctgagtactgtaggcacggcacttgtgaaagatcagaagctggtgtttgtgtatctactagtggtagatgggtacttaacaatgattattacagatctttaccaggagttttctgtggtgtagatgctgtaaatttacttactaatatgtttacaccactaattcaacctattggtgctttggacatatcagcatctatagtagctggtggtattgtagctatcgtagtaacatgccttgcctactattttatgaggtttagaagagcttatggtgaatacagtcatgtagttgcctttaatactttactattccttatgtcattcactgtactctgtttaacaccagtttactcattcttacctggtgtttattctgttatttacttgtacttgacattttatcttactaatgatgtttcttttttagcacatattcagtggatggttatgttcacacctttagtacctttctggataacaattgcttatatcatttgtatttccacaaagcatttctattggttctttagtaattacctaaagagacgtgtagtctttaatggtgtttcctttagtacttttgaagaagctgcgctgtgcacctttttgttaaataaagaaatgtatctaaagttgcgtagtgatgtgctattacctcttacgcaatataatagatacttagctctttataataagtacaagtattttagtggagcaatggatacaactagctacagagaagctgcttgttgtcatctcgcaaaggctctcaatgacttcagtaactcaggttctgatgttctttaccaaccaccacaaacctctatcacctcagctgttttgcagagtggttttagaaaaatggcattcccatctggtaaagttgagggttgtatggtacaagtaacttgtggtacaactacacttaacggtctttggcttgatgacgtagtttactgtccaagacatgtgatctgcacctctgaagacatgcttaaccctaattatgaagatttactcattcgtaagtctaatcataatttcttggtacaggctggtaatgttcaactcagggttattggacattctatgcaaaattgtgtacttaagcttaaggttgatacagccaatcctaagacacctaagtataagtttgttcgcattcaaccaggacagactttttcagtgttagcttgttacaatggttcaccatctggtgtttaccaatgtgctatgaggcccaatttcactattaagggttcattccttaatggttcatgtggtagtgttggttttaacatagattatgactgtgtctctttttgttacatgcaccatatggaattaccaactggagttcatgctggcacagacttagaaggtaacttttatggaccttttgttgacaggcaaacagcacaagcagctggtacggacacaactattacagttaatgttttagcttggttgtacgctgctgttataaatggagacaggtggtttctcaatcgatttaccacaactcttaatgactttaaccttgtggctatgaagtacaattatgaacctctaacacaagaccatgttgacatactaggacctctttctgctcaaactggaattgccgttttagatatgtgtgcttcattaaaagaattactgcaaaatggtatgaatggacgtaccatattgggtagtgctttattagaagatgaatttacaccttttgatgttgttagacaatgctcaggtgttactttccaaagtgcagtgaaaagaacaatcaagggtacacaccactggttgttactcacaattttgacttcacttttagttttagtccagagtactcaatggtctttgttcttttttttgtatgaaaatgcctttttaccttttgctatgggtattattgctatgtctgcttttgcaatgatgtttgtcaaacataagcatgcatttctctgtttgtttttgttaccttctcttgccactgtagcttattttaatatggtctatatgcctgctagttgggtgatgcgtattatgacatggttggatatggttgatactagtttgtctggttttaagctaaaagactgtgttatgtatgcatcagctgtagtgttactaatccttatgacagcaagaactgtgtatgatgatggtgctaggagagtgtggacacttatgaatgtcttgacactcgtttataaagtttattatggtaatgctttagatcaagccatttccatgtgggctcttataatctctgttacttctaactactcaggtgtagttacaactgtcatgtttttggccagaggtattgtttttatgtgtgttgagtattgccctattttcttcataactggtaatacacttcagtgtataatgctagtttattgtttcttaggctatttttgtacttgttactttggcctcttttgtttactcaaccgctactttagactgactcttggtgtttatgattacttagtttctacacaggagtttagatatatgaattcacagggactactcccacccaagaatagcatagatgccttcaaactcaacattaaattgttgggtgttggtggcaaaccttgtatcaaagtagccactgtacagtctaaaatgtcagatgtaaagtgcacatcagtagtcttactctcagttttgcaacaactcagagtagaatcatcatctaaattgtgggctcaatgtgtccagttacacaatgacattctcttagctaaagatactactgaagcctttgaaaaaatggtttcactactttctgttttgctttccatgcagggtgctgtagacataaacaagctttgtgaagaaatgctggacaacagggcaaccttacaagctatagcctcagagtttagttcccttccatcatatgcagcttttgctactgctcaagaagcttatgagcaggctgttgctaatggtgattctgaagttgttcttaaaaagttgaagaagtctttgaatgtggctaaatctgaatttgaccgtgatgcagccatgcaacgtaagttggaaaagatggctgatcaagctatgacccaaatgtataaacaggctagatctgaggacaagagggcaaaagttactagtgctatgcagacaatgcttttcactatgcttagaaagttggataatgatgcactcaacaacattatcaacaatgcaagagatggttgtgttcccttgaacataatacctcttacaacagcagccaaactaatggttgtcataccagactataacacatataaaaatacgtgtgatggtacaacatttacttatgcatcagcattgtgggaaatccaacaggttgtagatgcagatagtaaaattgttcaacttagtgaaattagtatggacaattcacctaatttagcatggcctcttattgtaacagctttaagggccaattctgctgtcaaattacagaataatgagcttagtcctgttgcactacgacagatgtcttgtgctgccggtactacacaaactgcttgcactgatgacaatgcgttagcttactacaacacaacaaagggaggtaggtttgtacttgcactgttatccgatttacaggatttgaaatgggctagattccctaagagtgatggaactggtactatctatacagaactggaaccaccttgtaggtttgttacagacacacctaaaggtcctaaagtgaagtatttatactttattaaaggattaaacaacctaaatagaggtatggtacttggtagtttagctgccacagtacgtctacaagctggtaatgcaacagaagtgcctgccaattcaactgtattatctttctgtgcttttgctgtagatgctgctaaagcttacaaagattatctagctagtgggggacaaccaatcactaattgtgttaagatgttgtgtacacacactggtactggtcaggcaataacagttacaccggaagccaatatggatcaagaatcctttggtggtgcatcgtgttgtctgtactgccgttgccacatagatcatccaaatcctaaaggattttgtgacttaaaaggtaagtatgtacaaatacctacaacttgtgctaatgaccctgtgggttttacacttaaaaacacagtctgtaccgtctgcggtatgtggaaaggttatggctgtagttgtgatcaactccgcgaacccatgcttcagtcagctgatgcacaatcgtttttaaacgggtttgcggtgtaagtgcagcccgtcttacaccgtgcggcacaggcactagtactgatgtcgtatacagggcttttgacatctacaatgataaagtagctggttttgctaaattcctaaaaactaattgttgtcgcttccaagaaaaggacgaagatgacaatttaattgattcttactttgtagttaagagacacactttctctaactaccaacatgaagaaacaatttataatttacttaaggattgtccagctgttgctaaacatgacttctttaagtttagaatagacggtgacatggtaccacatatatcacgtcaacgtcttactaaatacacaatggcagacctcgtctatgctttaaggcattttgatgaaggtaattgtgacacattaaaagaaatacttgtcacatacaattgttgtgatgatgattatttcaataaaaaggactggtatgattttgtagaaaacccagatatattacgcgtatacgccaacttaggtgaacgtgtacgccaagctttgttaaaaacagtacaattctgtgatgccatgcgaaatgctggtattgttggtgtactgacattagataatcaagatctcaatggtaactggtatgatttcggtgatttcatacaaaccacgccaggtagtggagttcctgttgtagattcttattattcattgttaatgcctatattaaccttgaccagggctttaactgcagagtcacatgttgacactgacttaacaaagccttacattaagtgggatttgttaaaatatgacttcacggaagagaggttaaaactctttgaccgttattttaaatattgggatcagacataccacccaaattgtgttaactgtttggatgacagatgcattctgcattgtgcaaactttaatgttttattctctacagtgttcccacctacaagttttggaccactagtgagaaaaatatttgttgatggtgttccatttgtagtttcaactggataccacttcagagagctaggtgttgtacataatcaggatgtaaacttacatagctctagacttagttttaaggaattacttgtgtatgctgctgaccctgctatgcacgctgcttctggtaatctattactagataaacgcactacgtgcttttcagtagctgcacttactaacaatgttgcttttcaaactgtcaaacccggtaattttaacaaagacttctatgactttgctgtgtctaagggtttctttaaggaaggaagttctgttgaattaaaacacttcttctttgctcaggatggtaatgctgctatcagcgattatgactattatcgttataatctaccaacaatgtgtgatatcagacaactactatttgtagttgaagttgttgataagtactttgattgttacgatggtggctgtattaatgctaaccaagtcatcgtcaacaacctagacaaatcagctggttttccatttaataaatggggtaaggctagactttattatgattcaatgagttatgaggatcaagatgcacttttcgcatatacaaaacgtaatgtcatccctactataactcaaatgaatcttaagtatgccattagtgcaaagaatagagctcgcaccgtagctggtgtctctatctgtagtactatgaccaatagacagtttcatcaaaaattattgaaatcaatagccgccactagaggagctactgtagtaattggaacaagcaaattctatggtggttggcacaacatgttaaaaactgtttatagtgatgtagaaaaccctcaccttatgggttgggattatcctaaatgtgatagagccatgcctaacatgcttagaattatggcctcacttgttcttgctcgcaaacatacaacgtgttgtagcttgtcacaccgtttctatagattagctaatgagtgtgctcaagtattgagtgaaatggtcatgtgtggcggttcactatatgttaaaccaggtggaacctcatcaggagatgccacaactgcttatgctaatagtgtttttaacatttgtcaagctgtcacggccaatgttaatgcacttttatctactgatggtaacaaaattgccgataagtatgtccgcaatttacaacacagactttatgagtgtctctatagaaatagagatgttgacacagactttgtgaatgagttttacgcatatttgcgtaaacatttctcaatgatgatactctctgacgatgctgttgtgtgtttcaatagcacttatgcatctcaaggtctagtggctagcataaagaactttaagtcagttctttattatcaaaacaatgtttttatgtctgaagcaaaatgttggactgagactgaccttactaaaggacctcatgaattttgctctcaacatacaatgctagttaaacagggtgatgattatgtgtaccttccttacccagatccatcaagaatcctaggggccggctgttttgtagatgatatcgtaaaaacagatggtacacttatgattgaacggttcgtgtctttagctatagatgcttacccacttactaaacatcctaatcaggagtatgctgatgtctttcatttgtacttacaatacataagaaagctacatgatgagttaacaggacacatgttagacatgtattctgttatgcttactaatgataacacttcaaggtattgggaacctgagttttatgaggctatgtacacaccgcatacagtcttacaggctgttggggcttgtgttctttgcaattcacagacttcattaagatgtggtgcttgcatacgtagaccattcttatgttgtaaatgctgttacgaccatgtcatatcaacatcacataaattagtcttgtctgttaatccgtatgtttgcaatgctccaggttgtgatgtcacagatgtgactcaactttacttaggaggtatgagctattattgtaaatcacataaaccacccattagttttccattgtgtgctaatggacaagtttttggtttatataaaaatacatgtgttggtagcgataatgttactgactttaatgcaattgcaacatgtgactggacaaatgctggtgattacattttagctaacacctgtactgaaagactcaagctttttgcagcagaaacgctcaaagctactgaggagacatttaaactgtcttatggtattgctactgtacgtgaagtgctgtctgacagagaattacatctttcatgggaagttggtaaacctagaccaccacttaaccgaaattatgtctttactggttatcgtgtaactaaaaacagtaaagtacaaataggagagtacacctttgaaaaaggtgactatggtgatgctgttgtttaccgaggtacaacaacttacaaattaaatgttggtgattattttgtgctgacatcacatacagtaatgccattaagtgcacctacactagtgccacaagagcactatgttagaattactggcttatacccaacactcaatatctcagatgagttttctagcaatgttgcaaattatcaaaaggttggtatgcaaaagtattctacactccagggaccacctggtactggtaagagtcattttgctattggcctagctctctactacccttctgctcgcatagtgtatacagcttgctctcatgccgctgttgatgcactatgtgagaaggcattaaaatatttgcctatagataaatgtagtagaattatacctgcacgtgctcgtgtagagtgttttgataaattcaaagtgaattcaacattagaacagtatgtcttttgtactgtaaatgcattgcctgagacgacagcagatatagttgtctttgatgaaatttcaatggccacaaattatgatttgagtgttgtcaatgccagattacgtgctaagcactatgtgtacattggcgaccctgctcaattacctgcaccacgcacattgctaactaagggcacactagaaccagaatatttcaattcagtgtgtagacttatgaaaactataggtccagacatgttcctcggaacttgtcggcgttgtcctgctgaaattgttgacactgtgagtgctttggtttatgataataagcttaaagcacataaagacaaatcagctcaatgctttaaaatgttttataagggtgttatcacgcatgatgtttcatctgcaattaacaggccacaaataggcgtggtaagagaattccttacacgtaaccctgcttggagaaaagctgtctttatttcaccttataattcacagaatgctgtagcctcaaagattttgggactaccaactcaaactgttgattcatcacagggctcagaatatgactatgtcatattcactcaaaccactgaaacagctcactcttgtaatgtaaacagatttaatgttgctattaccagagcaaaagtaggcatactttgcataatgtctgatagagacctttatgacaagttgcaatttacaagtcttgaaattccacgtaggaatgtggcaactttacaagctgaaaatgtaacaggactctttaaagattgtagtaaggtaatcactgggttacatcctacacaggcacctacacacctcagtgttgacactaaattcaaaactgaaggtttatgtgttgacatacctggcatacctaaggacatgacctatagaagactcatctctatgatgggttttaaaatgaattatcaagttaatggttaccctaacatgtttatcacccgcgaagaagctataagacatgtacgtgcatggattggcttcgatgtcgaggggtgtcatgctactagagaagctgttggtaccaatttacctttacagctaggtttttctacaggtgttaacctagttgctgtacctacaggttatgttgatacacctaataatacagatttttccagagttagtgctaaaccaccgcctggagatcaatttaaacacctcataccacttatgtacaaaggacttccttggaatgtagtgcgtataaagattgtacaaatgttaagtgacacacttaaaaatctctctgacagagtcgtatttgtcttatgggcacatggctttgagttgacatctatgaagtattttgtgaaaataggacctgagcgcacctgttgtctatgtgatagacgtgccacatgcttttccactgcttcagacacttatgcctgttggcatcattctattggatttgattacgtctataatccgtttatgattgatgttcaacaatggggttttacaggtaacctacaaagcaaccatgatctgtattgtcaagtccatggtaatgcacatgtagctagttgtgatgcaatcatgactaggtgtctagctgtccacgagtgctttgttaagcgtgttgactggactattgaatatcctataattggtgatgaactgaagattaatgcggcttgtagaaaggttcaacacatggttgttaaagctgcattattagcagacaaattcccagttcttcacgacattggtaaccctaaagctattaagtgtgtacctcaagctgatgtagaatggaagttctatgatgcacagccttgtagtgacaaagcttataaaatagaagaattattctattcttatgccacacattctgacaaattcacagatggtgtatgcctattttggaattgcaatgtcgatagatatcctgctaattccattgtttgtagatttgacactagagtgctatctaaccttaacttgcctggttgtgatggtggcagtttgtatgtaaataaacatgcattccacacaccagcttttgataaaagtgcttttgttaatttaaaacaattaccatttttctattactctgacagtccatgtgagtctcatggaaaacaagtagtgtcagatatagattatgtaccactaaagtctgctacgtgtataacacgttgcaatttaggtggtgctgtctgtagacatcatgctaatgagtacagattgtatctcgatgcttataacatgatgatctcagctggctttagcttgtgggtttacaaacaatttgatacttataacctctggaacacttttacaagacttcagagtttagaaaatgtggcttttaatgttgtaaataagggacactttgatggacaacagggtgaagtaccagtttctatcattaataacactgtttacacaaaagttgatggtgttgatgtagaattgtttgaaaataaaacaacattacctgttaatgtagcatttgagctttgggctaagcgcaacattaaaccagtaccagaggtgaaaatactcaataatttgggtgtggacattgctgctaatactgtgatctgggactacaaaagagatgctccagcacatatatctactattggtgtttgttctatgactgacatagccaagaaaccaactgaaacgatttgtgcaccactcactgtcttttttgatggtagagttgatggtcaagtagacttatttagaaatgcccgtaatggtgttcttattacagaaggtagtgttaaaggtttacaaccatctgtaggtcccaaacaagctagtcttaatggagtcacattaattggagaagccgtaaaaacacagttcaattattataagaaagttgatggtgttgtccaacaattacctgaaacttactttactcagagtagaaatttacaagaatttaaacccaggagtcaaatggaaattgatttcttagaattagctatggatgaattcattgaacggtataaattagaaggctatgccttcgaacatatcgtttatggagattttagtcatagtcagttaggtggtttacatctactgattggactagctaaacgttttaaggaatcaccttttgaattagaagattttattcctatggacagtacagttaaaaactatttcataacagatgcgcaaacaggttcatctaagtgtgtgtgttctgttattgatttattacttgatgattttgttgaaataataaaatcccaagatttatctgtagtttctaaggttgtcaaagtgactattgactatacagaaatttcatttatgctttggtgtaaagatggccatgtagaaacattttacccaaaattacaatctagtcaagcgtggcaaccgggtgttgctatgcctaatctttacaaaatgcaaagaatgctattagaaaagtgtgaccttcaaaattatggtgatagtgcaacattacctaaaggcataatgatgaatgtcgcaaaatatactcaactgtgtcaatatttaaacacattaacattagctgtaccctataatatgagagttatacattttggtgctggttctgataaaggagttgcaccaggtacagctgttttaagacagtggttgcctacgggtacgctgcttgtcgattcagatcttaatgactttgtctctgatgcagattcaactttgattggtgattgtgcaactgtacatacagctaataaatgggatctcattattagtgatatgtacgaccctaagactaaaaatgttacaaaagaaaatgactctaaagagggttttttcacttacatttgtgggtttatacaacaaaagctagctcttggaggttccgtggctataaagataacagaacattcttggaatgctgatctttataagctcatgggacacttcgcatggtggacagcctttgttactaatgtgaatgcgtcatcatctgaagcatttttaattggatgtaattatcttggcaaaccacgcgaacaaatagatggttatgtcatgcatgcaaattacatattttggaggaatacaaatccaattcagttgtcttcctattctttatttgacatgagtaaatttccccttaaattaaggggtactgctgttatgtctttaaaagaaggtcaaatcaatgatatgattttatctcttcttagtaaaggtagacttataattagagaaaacaacagagttgttatttctagtgatgttcttgttaacaactaaacgaacaatgtttgtttttcttgttttattgccactagtctctagtcagtgtgttaatcttacaaccagaactcaattaccccctgcatacactaattctttcacacgtggtgtttattaccctgacaaagttttcagatcctcagttttacattcaactcaggacttgttcttacctttcttttccaatgttacttggttccatgctatacatgtctctgggaccaatggtactaagaggtttgataaccctgtcctaccatttaatgatggtgtttattttgcttccactgagaagtctaacataataagaggctggatttttggtactactttagattcgaagacccagtccctacttattgttaataacgctactaatgttgttattaaagtctgtgaatttcaattttgtaatgatccatttttgggtgtttattaccacaaaaacaacaaaagttggatggaaagtgagttcagagtttattctagtgcgaataattgcacttttgaatatgtctctcagccttttcttatggaccttgaaggaaaacagggtaatttcaaaaatcttagggaatttgtgtttaagaatattgatggttattttaaaatatattctaagcacacgcctattaatttagtgcgtgatctccctcagggtttttcggctttagaaccattggtagatttgccaataggtattaacatcactaggtttcaaactttacttgctttacatagaagttatttgactcctggtgattcttcttcaggttggacagctggtgctgcagcttattatgtgggttatcttcaacctaggacttttctattaaaatataatgaaaatggaaccattacagatgctgtagactgtgcacttgaccctctctcagaaacaaagtgtacgttgaaatccttcactgtagaaaaaggaatctatcaaacttctaactttagagtccaaccaacagaatctattgttagatttcctaatattacaaacttgtgcccttttggtgaagtttttaacgccaccagatttgcatctgtttatgcttggaacaggaagagaatcagcaactgtgttgctgattattctgtcctatataattccgcatcattttccacttttaagtgttatggagtgtctcctactaaattaaatgatctctgctttactaatgtctatgcagattcatttgtaattagaggtgatgaagtcagacaaatcgctccagggcaaactggaaagattgctgattataattataaattaccagatgattttacaggctgcgttatagcttggaattctaacaatcttgattctaaggttggtggtaattataattacctgtatagattgtttaggaagtctaatctcaaaccttttgagagagatatttcaactgaaatctatcaggccggtagcacaccttgtaatggtgttgaaggttttaattgttactttcctttacaatcatatggtttccaacccactaatggtgttggttaccaaccatacagagtagtagtactttcttttgaacttctacatgcaccagcaactgtttgtggacctaaaaagtctactaatttggttaaaaacaaatgtgtcaatttcaacttcaatggtttaacaggcacaggtgttcttactgagtctaacaaaaagtttctgcctttccaacaatttggcagagacattgctgacactactgatgctgtccgtgatccacagacacttgagattcttgacattacaccatgttcttttggtggtgtcagtgttataacaccaggaacaaatacttctaaccaggttgctgttctttatcaggatgttaactgcacagaagtccctgttgctattcatgcagatcaacttactcctacttggcgtgtttattctacaggttctaatgtttttcaaacacgtgcaggctgtttaataggggctgaacatgtcaacaactcatatgagtgtgacatacccattggtgcaggtatatgcgctagttatcagactcagactaattctcctcggcgggcacgtagtgtagctagtcaatccatcattgcctacactatgtcacttggtgcagaaaattcagttgcttactctaataactctattgccatacccacaaattttactattagtgttaccacagaaattctaccagtgtctatgaccaagacatcagtagattgtacaatgtacatttgtggtgattcaactgaatgcagcaatcttttgttgcaatatggcagtttttgtacacaattaaaccgtgctttaactggaatagctgttgaacaagacaaaaacacccaagaagtttttgcacaagtcaaacaaatttacaaaacaccaccaattaaagattttggtggttttaatttttcacaaatattaccagatccatcaaaaccaagcaagaggtcatttattgaagatctacttttcaacaaagtgacacttgcagatgctggcttcatcaaacaatatggtgattgccttggtgatattgctgctagagacctcatttgtgcacaaaagtttaacggccttactgttttgccacctttgctcacagatgaaatgattgctcaatacacttctgcactgttagcgggtacaatcacttctggttggacctttggtgcaggtgctgcattacaaataccatttgctatgcaaatggcttataggtttaatggtattggagttacacagaatgttctctatgagaaccaaaaattgattgccaaccaatttaatagtgctattggcaaaattcaagactcactttcttccacagcaagtgcacttggaaaacttcaagatgtggtcaaccaaaatgcacaagctttaaacacgcttgttaaacaacttagctccaattttggtgcaatttcaagtgttttaaatgatatcctttcacgtcttgacaaagttgaggctgaagtgcaaattgataggttgatcacaggcagacttcaaagtttgcagacatatgtgactcaacaattaattagagctgcagaaatcagagcttctgctaatcttgctgctactaaaatgtcagagtgtgtacttggacaatcaaaaagagttgatttttgtggaaagggctatcatcttatgtccttccctcagtcagcacctcatggtgtagtcttcttgcatgtgacttatgtccctgcacaagaaaagaacttcacaactgctcctgccatttgtcatgatggaaaagcacactttcctcgtgaaggtgtctttgtttcaaatggcacacactggtttgtaacacaaaggaatttttatgaaccacaaatcattactacagacaacacatttgtgtctggtaactgtgatgttgtaataggaattgtcaacaacacagtttatgatcctttgcaacctgaattagactcattcaaggaggagttagataaatattttaagaatcatacatcaccagatgttgatttaggtgacatctctggcattaatgcttcagttgtaaacattcaaaaagaaattgaccgcctcaatgaggttgccaagaatttaaatgaatctctcatcgatctccaagaacttggaaagtatgagcagtatataaaatggccatggtacatttggctaggttttatagctggcttgattgccatagtaatggtgacaattatgctttgctgtatgaccagttgctgtagttgtctcaagggctgttgttcttgtggatcctgctgcaaatttgatgaagacgactctgagccagtgctcaaaggagtcaaattacattacacataaacgaacttatggatttgtttatgagaatcttcacaattggaactgtaactttgaagcaaggtgaaatcaaggatgctactccttcagattttgttcgcgctactgcaacgataccgatacaagcctcactccctttcggatggcttattgttggcgttgcacttcttgctgtttttcagagcgcttccaaaatcataaccctcaaaaagagatggcaactagcactctccaagggtgttcactttgtttgcaacttgctgttgttgtttgtaacagtttactcacaccttttgctcgttgctgctggccttgaagccccttttctctatctttatgctttagtctacttcttgcagagtataaactttgtaagaataataatgaggctttggctttgctggaaatgccgttccaaaaacccattactttatgatgccaactattttctttgctggcatactaattgttacgactattgtataccttacaatagtgtaacttcttcaattgtcattacttcaggtgatggcacaacaagtcctatttctgaacatgactaccagattggtggttatactgaaaaatgggaatctgtagtaaaagactgtgttgtattacacagttacttcacttcagactattaccagctgtactcaactcaattgagtacagacactggtgttgaacatgttaccttcttcatctacaataaaattgttgatgagcctgaagaacatgtccaaattcacacaatcgacggttcatccggagttgttaatccagtaatggaaccaatttatgatgaaccgacgacgactactagcgtgcctttgtaagcacaagctgatgagtacgaacttatgtactcattcgtttcggaagagacaggtacgttaatagttaatagcgtacttctttttcttgctttcgtggtattcttgctagttacactagccatccttactgcgcttcgattgtgtgcgtactgctgcaatattgttaacgtgagtcttgtaaaaccttctttttacgtttactctcgtgttaaaaatctgaattcttctagagttcctgatcttctggtctaaacgaactaaatattatattagtttttctgtttggaactttaattttagccatggcagattccaacggtactattaccgttgaagagcttaaaaagctccttgaacaatggaacctagtaataggtttcctattccttacatggatttgtcttctacaatttgcctatgccaacaggaataggtttttgtatataattaagttaattttcctctggctgttatggccagtaactttagcttgttttgtgcttgctgctgtttacagaataaattggatcaccggtggaattgctatcgcaatggcttgtcttgtaggcttgatgtggctcagctacttcattgcttctttcagactgtttgcgcgtacgcgttccatgtggtcattcaatccagaaactaacattcttctcaacgtgccactccatggcactattctgaccagaccgcttctagaaagtgaactcgtaatcggagctgtgatccttcgtggacatcttcgtattgctggacaccatctaggacgctgtgacatcaaggacctgcctaaagaaatcactgttgctacatcacgaacgctttcttattacaaattgggagcttcgcagcgtgtagcaggtgactcaggttttgctgcatacagtcgctacaggattggcaactataaattaaacacagaccattccagtagcagtgacaatattgctttgcttgtacagtaagtgacaacagatgtttcatctcgttgactttcaggttactatagcagagatattactaattattatgaggacttttaaagtttccatttggaatcttgattacatcataaacctcataattaaaaatttatctaagtcactaactgagaataaatattctcaattagatgaagagcaaccaatggagattgattaaacgaacatgaaaattattcttttcttggcactgataacactcgctacttgtgagctttatcactaccaagagtgtgttagaggtacaacagtacttttaaaagaaccttgctcttctggaacatacgagggcaattcaccatttcatcctctagctgataacaaatttgcactgacttgctttagcactcaatttgcttttgcttgtcctgacggcgtaaaacacgtctatcagttacgtgccagatcagtttcacctaaactgttcatcagacaagaggaagttcaagaactttactctccaatttttcttattgttgcggcaatagtgtttataacactttgcttcacactcaaaagaaagacagaatgattgaactttcattaattgacttctatttgtgctttttagcctttctgctattccttgttttaattatgcttattatcttttggttctcacttgaactgcaagatcataatgaaacttgtcacgcctaaacgaacatgaaatttcttgttttcttaggaatcatcacaactgtagctgcatttcaccaagaatgtagtttacagtcatgtactcaacatcaaccatatgtagttgatgacccgtgtcctattcacttctattctaaatggtatattagagtaggagctagaaaatcagcacctttaattgaattgtgcgtggatgaggctggttctaaatcacccattcagtacatcgatatcggtaattatacagtttcctgttcaccttttacaattaattgccaggaacctaaattgggtagtcttgtagtgcgttgttcgttctatgaagactttttagagtatcatgacgttcgtgttgttttagatttcatctaaacgaacaaactaaaatgtctgataatggaccccaaaatcagcgaaatgcaccccgcattacgtttggtggaccctcagattcaactggcagtaaccagaatggagaacgcagtggggcgcgatcaaaacaacgtcggccccaaggtttacccaataatactgcgtcttggttcaccgctctcactcaacatggcaaggaagaccttaaattccctcgaggacaaggcgttccaattaacaccaatagcagtccagatgaccaaattggctactaccgaagagctaccagacgaattcgtggtggtgacggtaaaatgaaagatctcagtccaagatggtatttctactacctaggaactgggccagaagctggacttccctatggtgctaacaaagatggcatcatatgggttgcaactgagggagccttgaatacaccaaaagatcacattggcacccgcaatcctgctaacaatgctgcaatcgtgctacaacttcctcaaggaacaacattgccaaaaggcttctacgcagaagggagcagaggcggcagtcaagcctcttctcgttcctcatcacgtagtcgcaacagttcaagaaatttaactccaggcagcagtaggggaacttctcctgctagaatggctggcaatggcggtgatgctgctcttgctttgctgctgcttgacagattgaaccagcttgagagcaaaatgtctggtaaaggccaacaacaacaaggccaaactgtcactaagaaatctgctgctgaggcttctaagaagcctcggcaaaaacgtactgccactaaagcatacaatgtaacacaagctttcggcagacgtggtccagaacaaacccaaggaaattttggggaccaggaactaatcagacaaggaactgattacaaacattggccgcaaattgcacaatttgcccccagcgcttcagcgttcttcggaatgtcgcgcattggcatggaagtcacaccttcgggaacgtggttgacctacacaggtgccatcaaattggatgacaaagatccaaatttcaaagatcaagtcattttgctgaataagcatattgacgcatacaaaacattcccaccaacagagcctaaaaaggacaaaaagaagaaggctgatgaaactcaagccttaccgcagagacagaagaaacagcaaactgtgactcttcttcctgctgcagatttggatgatttctccaaacaattgcaacaatccatgagcagtgctgactcaactcaggcctaaactcatgcagaccacacaaggcagatgggctatataaacgttttcgcttttccgtttacgatatatagtctactcttgtgcagaatgaattctcgtaactacatagcacaagtagatgtagttaactttaatctcacatagcaatctttaatcagtgtgtaacattagggaggacttgaaagagccaccacattttcaccgaggccacgcggagtacgatcgagtgtacagtgaacaatgctagggagagctgcctatatggaagagccctaatgtgtaaaattaattttagtagtgctatcc

SEQ ID NO: 9 - DNA, 29867 bp, SARS-CoV-2
  misc_feature (11083)..(11083): n is a, c, g, or t
attaaaggtttataccttcccaggtaacaaaccaaccaactttcgatctcttgtagatctgttctctaaacgaactttaaaatctgtgtggctgtcactcggctgcatgcttagtgcactcacgcagtataattaataactaattactgtcgttgacaggacacgagtaactcgtctatcttctgcaggctgcttacggtttcgtccgtgttgcagccgatcatcagcacatctaggtttcgtccgggtgtgaccgaaaggtaagatggagagccttgtccctggtttcaacgagaaaacacacgtccaactcagtttgcctgttttacaggttcgcgacgtgctcgtacgtggctttggagactccgtggaggaggtcttatcagaggcacgtcaacatcttaaagatggcacttgtggcttagtagaagttgaaaaaggcgttttgcctcaacttgaacagccctatgtgttcatcaaacgttcggatgctcgaactgcacctcatggtcatgttatggttgagctggtagcagaactcgaaggcattcagtacggtcgtagtggtgagacacttggtgtccttgtccctcatgtgggcgaaataccagtggcttaccgcaaggttcttcttcgtaagaacggtaataaaggagctggtggccatagttacggcgccgatctaaagtcatttgacttaggcgacgagcttggcactgatccttatgaagattttcaagaaaactggaacactaaacatagcagtggtgttacccgtgaactcatgcgtgagcttaacggaggggcatacactcgctatgtcgataacaacttctgtggccctgatggctaccctcttgagtgcattaaagaccttctagcacgtgctggtaaagcttcatgcactttgtccgaacaactggactttattgacactaagaggggtgtatactgctgccgtgaacatgagcatgaaattgcttggtacacggaacgttctgaaaagagctatgaattgcagacaccttttgaaattaaattggcaaagaaatttgacaccttcaatggggaatgtccaaattttgtatttcccttaaattccataatcaagactattcaaccaagggttgaaaagaaaaagcttgatggctttatgggtagaattcgatctgtctatccagttgcgtcaccaaatgaatgcaaccaaatgtgcctttcaactctcatgaagtgtgatcattgtggtgaaacttcatggcagacgggcgattttgttaaagccacttgcgaattttgtggcactgagaatttgactaaagaaggtgccactacttgtggttacttaccccaaaatgctgttgttaaaatttattgtccagcatgtcacaattcagaagtaggacctgagcatagtcttgccgaataccataatgaatctggcttgaaaaccattcttcgtaagggtggtcgcactattgcctttggaggctgtgtgttctcttatgttggttgccataacaagtgtgcctattgggttccacgtgctagcgctaacataggttgtaaccatacaggtgttgttggagaaggttccgaaggtcttaatgacaaccttcttgaaatactccaaaaagagaaagtcaacatcaatattgttggtgactttaaacttaatgaagagatcgccattattttggcatctttttctgcttccacaagtgcttttgtggaaactgtgaaaggtttggattataaagcattcaaacaaattgttgaatcctgtggtaattttaaagttacaaaaggaaaagctaaaaaaggtgcctggaatattggtgaacagaaatcaatactgagtcctctttatgcatttgcatcagaggctgctcgtgttgtacgatcaattttctcccgcactcttgaaactgctcaaaattctgtgcgtgttttacagaaggccgctataacaatactagatggaatttcacagtattcactgagactcattgatgctatgatgttcacatctgatttggctactaacaatctagttgtaatggcctacattacaggtggtgttgttcagttgacttcgcagtggctaactaacatctttggcactgtttatgaaaaactcaaacccgtccttgattggcttgaagagaagtttaaggaaggtgtagagtttcttagagacggttgggaaattgttaaatttatctcaacctgtgcttgtgaaattgtcggtggacaaattgtcacctgtgctaaggaaattaaggagagtgttcagacattctttaagcttgtaaataaatttttggctttgtgtgctgactctatcattattggtggagctaaacttaaagccttgaatttaggtgaaacatttgtcacgcactcaaagggattgtacagaaagtgtgttaaatccagagaagaaactggcctactcatgcctctaaaagccccaaaagaaattatcttcttagagggagaaacacttcccacagaagtgttaacagaggaagttgtcttgaaaactggtgatttacaaccattagaacaacctactagtgaagctgttgaagctccattggttggtacaccagtttgtattaacgggcttatgttgctcgaaatcaaagacacagaaaagtactgtgcccttgcacctaatatgatggtaacaaacaataccttcacactcaaaggcggtgcaccaacaaaggttacttttggtgatgacactgtgatagaagtgcaaggttacaagagtgtgaatatcacttttgaacttgatgaaaggattgataaagtacttaatgagaagtgctctgcctatacagttgaactcggtacagaagtaaatgagttcgcctgtgttgtggcagatgctgtcataaaaactttgcaaccagtatctgaattacttacaccactgggcattgatttagatgagtggagtatggctacatactacttatttgatgagtctggtgagtttaaattggcttcacatatgtattgttctttctaccctccagatgaggatgaagaagaaggtgattgtgaagaagaagagtttgagccatcaactcaatatgagtatggtactgaagatgattaccaaggtaaacctttggaatttggtgccacttctgctgctcttcaacctgaagaagagcaagaagaagattggttagatgatgatagtcaacaaactgttggtcaacaagacggcagtgaggacaatcagacaactactattcaaacaattgttgaggttcaacctcaattagagatggaacttacaccagttgttcagactattgaagtgaatagttttagtggttatttaaaacttactgacaatgtatacattaaaaatgcagacattgtggaagaagctaaaaaggtaaaaccaacagtggttgttaatgcagccaatgtttaccttaaacatggaggaggtgttgcaggagccttaaataaggctactaacaatgccatgcaagttgaatctgatgattacatagctactaatggaccacttaaagtgggtggtagttgtgttttaagcggacacaatcttgctaaacactgtcttcatgttgtcggcccaaatgttaacaaaggtgaagacattcaacttcttaagagtgcttatgaaaattttaatcagcacgaagttctacttgcaccattattatcagctggtatttttggtgctgaccctatacattctttaagagtttgtgtagatactgttcgcacaaatgtctacttagctgtctttgataaaaatctctatgacaaacttgtttcaagctttttggaaatgaagagtgaaaagcaagttgaacaaaagatcgctgagattcctaaagaggaagttaagccatttataactgaaagtaaaccttcagttgaacagagaaaacaagatgataagaaaatcaaagcttgtgttgaagaagttacaacaactctggaagaaactaagttcctcacagaaaacttgttactttatattgacattaatggcaatcttcatccagattctgccactcttgttagtgacattgacatcactttcttaaagaaagatgctccatatatagtgggtgatgttgttcaagagggtgttttaactgctgtggttatacctactaaaaaggctggtggcactactgaaatgctagcgaaagctttgagaaaagtgccaacagacaattatataaccacttacccgggtcagggtttaaatggttacactgtagaggaggcaaagacagtgcttaaaaagtgtaaaagtgccttttacattctaccatctattatctctaatgagaagcaagaaattcttggaactgtttcttggaatttgcgagaaatgcttgcacatgcagaagaaacacgcaaattaatgcctgtctgtgtggaaactaaagccatagtttcaactatacagcgtaaatataagggtattaaaatacaagagggtgtggttgattatggtgctagattttacttttacaccagtaaaacaactgtagcgtcacttatcaacacacttaacgatctaaatgaaactcttgttacaatgccacttggctatgtaacacatggcttaaatttggaagaagctgctcggtatatgagatctctcaaagtgccagctacagtttctgtttcttcacctgatgctgttacagcgtataatggttatcttacttcttcttctaaaacacctgaagaacattttattgaaaccatctcacttgctggttcctataaagattggtcctattctggacaatctacacaactaggtatagaatttcttaagagaggtgataaaagtgtatattacactagtaatcctaccacattccacctagatggtgaagttatcacctttgacaatcttaagacacttctttctttgagagaagtgaggactattaaggtgtttacaacagtagacaacattaacctccacacgcaagttgtggacatgtcaatgacatatggacaacagtttggtccaacttatttggatggagctgatgttactaaaataaaacctcataattcacatgaaggtaaaacattttatgttttacctaatgatgacactctacgtgttgaggcttttgagtactaccacacaactgatcctagttttctgggtaggtacatgtcagcattaaatcacactaaaaagtggaaatacccacaagttaatggtttaacttctattaaatgggcagataacaactgttatcttgccactgcattgttaacactccaacaaatagagttgaagtttaatccacctgctctacaagatgcttattacagagcaagggctggtgaagctgctaacttttgtgcacttatcttagcctactgtaataagacagtaggtgagttaggtgatgttagagaaacaatgagttacttgtttcaacatgccaatttagattcttgcaaaagagtcttgaacgtggtgtgtaaaacttgtggacaacagcagacaacccttaagggtgtagaagctgttatgtacatgggcacactttcttatgaacaatttaagaaaggtgttcagataccttgtacgtgtggtaaacaagctacaaaatatctagtacaacaggagtcaccttttgttatgatgtcagcaccacctgctcagtatgaacttaagcatggtacatttacttgtgctagtgagtacactggtaattaccagtgtggtcactataaacatataacttctaaagaaactttgtattgcatagacggtgctttacttacaaagtcctcagaatacaaaggtcctattacggatgttttctacaaagaaaacagttacacaacaaccataaaaccagttacttataaattggatggtgttgtttgtacagaaattgaccctaagttggacaattattataagaaagacaattcttatttcacagagcaaccaattgatcttgtaccaaaccaaccatatccaaacgcaagcttcgataattttaagtttgtatgtgataatatcaaatttgctgatgatttaaaccagttaactggttataagaaacctgcttcaagagagcttaaagttacatttttccctgacttaaatggtgatgtggtggctattgattataaacactacacaccctcttttaagaaaggagctaaattgttacataaacctattgtttggcatgttaacaatgcaactaataaagccacgtataaaccaaatacctggtgtatacgttgtctttggagcacaaaaccagttgaaacatcaaattcgtttgatgtactgaagtcagaggacgcgcagggaatggataatcttgcctgcgaagatctaaaaccagtctctgaagaagtagtggaaaatcctaccatacagaaagacgttcttgagtgtaatgtgaaaactaccgaagttgtaggagacattatacttaaaccagcaaataatagtttaaaaattacagaagaggttggccacacagatctaatggctgcttatgtagacaattctagtcttactattaagaaacctaatgaattatctagagtattaggtttgaaaacccttgctactcatggtttagctgctgttaatagtgtcccttgggatactatagctaattatgctaagccttttcttaacaaagttgttagtacaactactaacatagttacacggtgtttaaaccgtgtttgtactaattatatgccttatttctttactttattgctacaattgtgtacttttactagaagtacaaattctagaattaaagcatctatgccgactactatagcaaagaatactgttaagagtgtcggtaaattttgtctagaggcttcatttaattatttgaagtcacctaatttttctaaactgataaatattataatttggtttttactattaagtgtttgcctaggttctttaatctactcaaccgctgctttaggtgttttaatgtctaatttaggcatgccttcttactgtactggttacagagaaggctatttgaactctactaatgtcactattgcaacctactgtactggttctataccttgtagtgtttgtcttagtggtttagattctttagacacctatccttctttagaaactatacaaattaccatttcatcttttaaatgggatttaactgcttttggcttagttgcagagtggtttttggcatatattcttttcactaggtttttctatgtacttggattggctgcaatcatgcaattgtttttcagctattttgcagtacattttattagtaattcttggcttatgtggttaataattaatcttgtacaaatggccccgatttcagctatggttagaatgtacatcttctttgcatcattttattatgtatggaaaagttatgtgcatgttgtagacggttgtaattcatcaacttgtatgatgtgttacaaacgtaatagagcaacaagagtcgaatgtacaactattgttaatggtgttagaaggtccttttatgtctatgctaatggaggtaaaggcttttgcaaactacacaattggaattgtgttaattgtgatacattctgtgctggtagtacatttattagtgatgaagttgcgagagacttgtcactacagtttaaaagaccaataaatcctactgaccagtcttcttacatcgttgatagtgttacagtgaagaatggttccatccatctttactttgataaagctggtcaaaagacttatgaaagacattctctctctcattttgttaacttagacaacctgagagctaataacactaaaggttcattgcctattaatgttatagtttttgatggtaaatcaaaatgtgaagaatcatctgcaaaatcagcgtctgtttactacagtcagcttatgtgtcaacctatactgttactagatcaggcattagtgtctgatgttggtgatagtgcggaagttgcagttaaaatgtttgatgcttacgttaatacgttttcatcaacttttaacgtaccaatggaaaaactcaaaacactagttgcaactgcagaagctgaacttgcaaagaatgtgtccttagacaatgtcttatctacttttatttcagcagctcggcaagggtttgttgattcagatgtagaaactaaagatgttgttgaatgtcttaaattgtcacatcaatctgacatagaagttactggcgatagttgtaataactatatgctcacctataacaaagttgaaaacatgacaccccgtgaccttggtgcttgtattgactgtagtgcgcgtcatattaatgcgcaggtagcaaaaagtcacaacattgctttgatatggaacgttaaagatttcatgtcattgtctgaacaactacgaaaacaaatacgtagtgctgctaaaaagaataacttaccttttaagttgacatgtgcaactactagacaagttgttaatgttgtaacaacaaagatagcacttaagggtggtaaaattgttaataattggttgaagcagttaattaaagttacacttgtgttcctttttgttgctgctattttctatttaataacacctgttcatgtcatgtctaaacatactgacttttcaagtgaaatcataggatacaaggctattgatggtggtgtcactcgtgacatagcatctacagatacttgttttgctaacaaacatgctgattttgacacatggtttagccagcgtggtggtagttatactaatgacaaagcttgcccattgattgctgcagtcataacaagagaagtgggttttgtcgtgcctggtttgcctggcacgatattacgcacaactaatggtgactttttgcatttcttacctagagtttttagtgcagttggtaacatctgttacacaccatcaaaacttatagagtacactgactttgcaacatcagcttgtgttttggctgctgaatgtacaatttttaaagatgcttctggtaagccagtaccatattgttatgataccaatgtactagaaggttctgttgcttatgaaagtttacgccctgacacacgttatgtgctcatggatggctctattattcaatttcctaacacctaccttgaaggttctgttagagtggtaacaacttttgattctgagtactgtaggcacggcacttgtgaaagatcagaagctggtgtttgtgtatctactagtggtagatgggtacttaacaatgattattacagatctttaccaggagttttctgtggtgtagatgctgtaaatttacttactaatatgtttacaccactaattcaacctattggtgctttggacatatcagcatctatagtagctggtggtattgtagctatcgtagtaacatgccttgcctactattttatgaggtttagaagagcttttggtgaatacagtcatgtagttgcctttaatactttactattccttatgtcattcactgtactctgtttaacaccagtttactcattcttacctggtgtttattctgttatttacttgtacttgacattttatcttactaatgatgtttcttttttagcacatattcagtggatggttatgttcacacctttagtacctttctggataacaattgcttatatcatttgtatttccacaaagcatttctattggttctttagtaattacctaaagagacgtgtagtctttaatggtgtttcctttagtacttttgaagaagctgcgctgtgcacctttttgttaaataaagaaatgtatctaaagttgcgtagtgatgtgctattacctcttacgcaatataatagatacttagctctttataataagtacaagtattttagtggagcaatggatacaactagctacagagaagctgcttgttgtcatctcgcaaaggctctcaatgacttcagtaactcaggttctgatgttctttaccaaccaccacaaacctctatcacctcagctgttttgcagagtggttttagaaaaatggcattcccatctggtaaagttgagggttgtatggtacaagtaacttgtggtacaactacacttaacggtctttggcttgatgacgtagtttactgtccaagacatgtgatctgcacctctgaagacatgcttaaccctaattatgaagatttactcattcgtaagtctaatcataatttcttggtacaggctggtaatgttcaactcagggttattggacattctatgcaaaattgtgtacttaagcttaaggttgatacagccaatcctaagacacctaagtataagtttgttcgcattcaaccaggacagactttttcagtgttagcttgttacaatggttcaccatctggtgtttaccaatgtgctatgaggcccaatttcactattaagggttcattccttaatggttcatgtggtagtgttggttttaacatagattatgactgtgtctctttttgttacatgcaccatatggaattaccaactggagttcatgctggcacagacttagaaggtaacttttatggaccttttgttgacaggcaaacagcacaagcagctggtacggacacaactattacagttaatgttttagcttggttgtacgctgctgttataaatggagacaggtggtttctcaatcgatttaccacaactcttaatgactttaaccttgtggctatgaagtacaattatgaacctctaacacaagaccatgttgacatactaggacctctttctgctcaaactggaattgccgttttagatatgtgtgcttcattaaaagaattactgcaaaatggtatgaatggacgtaccatattgggtagtgctttattagaagatgaatttacaccttttgatgttgttagacaatgctcaggtgttactttccaaagtgcagtgaaaagaacaatcaagggtacacaccactggttgttactcacaattttgacttcacttttagttttagtccagagtactcaatggtctttgttcttttttttntatgaaaatgcctttttaccttttgctatgggtattattgctatgtctgcttttgcaatgatgtttgtcaaacataagcatgcatttctctgtttgtttttgttaccttctcttgccactgtagcttattttaatatggtctatatgcctgctagttgggtgatgcgtattatgacatggttggatatggttgatactagtttgtctggttttaagctaaaagactgtgttatgtatgcatcagctgtagtgttactaatccttatgacagcaagaactgtgtatgatgatggtgctaggagagtgtggacacttatgaatgtcttgacactcgtttataaagtttattatggtaatgctttagatcaagccatttccatgtgggctcttataatctctgttacttctaactactcaggtgtagttacaactgtcatgtttttggccagaggtattgtttttatgtgtgttgagtattgccctattttcttcataactggtaatacacttcagtgtataatgctagtttattgtttcttaggctatttttgtacttgttactttggcctcttttgtttactcaaccgctactttagactgactcttggtgtttatgattacttagtttctacacaggagtttagatatatgaattcacagggactactcccacccaagaatagcatagatgccttcaaactcaacattaaattgttgggtgttggtggcaaaccttgtatcaaagtagccactgtacagtctaaaatgtcagatgtaaagtgcacatcagtagtcttactctcagttttgcaacaactcagagtagaatcatcatctaaattgtgggctcaatgtgtccagttacacaatgacattctcttagctaaagatactactgaagcctttgaaaaaatggtttcactactttctgttttgctttccatgcagggtgctgtagacataaacaagctttgtgaagaaatgctggacaacagggcaaccttacaagctatagcctcagagtttagttcccttccatcatatgcagcttttgctactgctcaagaagcttatgagcaggctgttgctaatggtgattctgaagttgttcttaaaaagttgaagaagtctttgaatgtggctaaatctgaatttgaccgtgatgcagccatgcaacgtaagttggaaaagatggctgatcaagctatgacccaaatgtataaacaggctagatctgaggacaagagggcaaaagttactagtgctatgcagacaatgcttttcactatgcttagaaagttggataatgatgcactcaacaacattatcaacaatgcaagagatggttgtgttcccttgaacataatacctcttacaacagcagccaaactaatggttgtcataccagactataacacatataaaaatacgtgtgatggtacaacatttacttatgcatcagcattgtgggaaatccaacaggttgtagatgcagatagtaaaattgttcaacttagtgaaattagtatggacaattcacctaatttagcatggcctcttattgtaacagctttaagggccaattctgctgtcaaattacagaataatgagcttagtcctgttgcactacgacagatgtcttgtgctgccggtactacacaaactgcttgcactgatgacaatgcgttagcttactacaacacaacaaagggaggtaggtttgtacttgcactgttatccgatttacaggatttgaaatgggctagattccctaagagtgatggaactggtactatctatacagaactggaaccaccttgtaggtttgttacagacacacctaaaggtcctaaagtgaagtatttatactttattaaaggattaaacaacctaaatagaggtatggtacttggtagtttagctgccacagtacgtctacaagctggtaatgcaacagaagtgcctgccaattcaactgtattatctttctgtgcttttgctgtagatgctgctaaagcttacaaagattatctagctagtgggggacaaccaatcactaattgtgttaagatgttgtgtacacacactggtactggtcaggcaataacagttacaccggaagccaatatggatcaagaatcctttggtggtgcatcgtgttgtctgtactgccgttgccacatagatcatccaaatcctaaaggattttgtgacttaaaaggtaagtatgtacaaatacctacaacttgtgctaatgaccctgtgggttttacacttaaaaacacagtctgtaccgtctgcggtatgtggaaaggttatggctgtagttgtgatcaactccgcgaacccatgcttcagtcagctgatgcacaatcgtttttaaacgggtttgcggtgtaagtgcagcccgtcttacaccgtgcggcacaggcactagtactgatgtcgtatacagggcttttgacatctacaatgataaagtagctggttttgctaaattcctaaaaactaattgttgtcgcttccaagaaaaggacgaagatgacaatttaattgattcttactttgtagttaagagacacactttctctaactaccaacatgaagaaacaatttataatttacttaaggattgtccagctgttgctaaacatgacttctttaagtttagaatagacggtgacatggtaccacatatatcacgtcaacgtcttactaaatacacaatggcagacctcgtctatgctttaaggcattttgatgaaggtaattgtgacacattaaaagaaatacttgtcacatacaattgttgtgatgatgattatttcaataaaaaggactggtatgattttgtagaaaacccagatatattacgcgtatacgccaacttaggtgaacgtgtacgccaagctttgttaaaaacagtacaattctgtgatgccatgcgaaatgctggtattgttggtgtactgacattagataatcaagatctcaatggtaactggtatgatttcggtgatttcatacaaaccacgccaggtagtggagttcctgttgtagattcttattattcattgttaatgcctatattaaccttgaccagggctttaactgcagagtcacatgttgacactgacttaacaaagccttacattaagtgggatttgttaaaatatgacttcacggaagagaggttaaaactctttgaccgttattttaaatattgggatcagacataccacccaaattgtgttaactgtttggatgacagatgcattctgcattgtgcaaactttaatgttttattctctacagtgttcccacctacaagttttggaccactagtgagaaaaatatttgttgatggtgttccatttgtagtttcaactggataccacttcagagagctaggtgttgtacataatcaggatgtaaacttacatagctctagacttagttttaaggaattacttgtgtatgctgctgaccctgctatgcacgctgcttctggtaatctattactagataaacgcactacgtgcttttcagtagctgcacttactaacaatgttgcttttcaaactgtcaaacccggtaattttaacaaagacttctatgactttgctgtgtctaagggtttctttaaggaaggaagttctgttgaattaaaacacttcttctttgctcaggatggtaatgctgctatcagcgattatgactactatcgttataatctaccaacaatgtgtgatatcagacaactactatttgtagttgaagttgttgataagtactttgattgttacgatggtggctgtattaatgctaaccaagtcatcgtcaacaacctagacaaatcagctggttttccatttaataaatggggtaaggctagactttattatgattcaatgagttatgaggatcaagatgcacttttcgcatatacaaaacgtaatgtcatccctactataactcaaatgaatcttaagtatgccattagtgcaaagaatagagctcgcaccgtagctggtgtctctatctgtagtactatgaccaatagacagtttcatcaaaaattattgaaatcaatagccgccactagaggagctactgtagtaattggaacaagcaaattctatggtggttggcacaacatgttaaaaactgtttatagtgatgtagaaaaccctcaccttatgggttgggattatcctaaatgtgatagagccatgcctaacatgcttagaattatggcctcacttgttcttgctcgcaaacatacaacgtgttgtagcttgtcacaccgtttctatagattagctaatgagtgtgctcaagtattgagtgaaatggtcatgtgtggcggttcactatatgttaaaccaggtggaacctcatcaggagatgccacaactgcttatgctaatagtgtttttaacatttgtcaagctgtcacggccaatgttaatgcacttttatctactgatggtaacaaaattgccgataagtatgtccgcaatttacaacacagactttatgagtgtctctatagaaatagagatgttgacacagactttgtgaatgagttttacgcatatttgcgtaaacatttctcaatgatgatactctctgacgatgctgttgtgtgtttcaatagcacttatgcatctcaaggtctagtggctagcataaagaactttaagtcagttctttattatcaaaacaatgtttttatgtctgaagcaaaatgttggactgagactgaccttactaaaggacctcatgaattttgctctcaacatacaatgctagttaaacagggtgatgattatgtgtaccttccttacccagatccatcaagaatcctaggggccggctgttttgtagatgatatcgtaaaaacagatggtacacttatgattgaacggttcgtgtctttagctatagatgcttacccacttactaaacatcctaatcaggagtatgctgatgtctttcatttgtacttacaatacataagaaagctacatgatgagttaacaggacacatgttagacatgtattctgttatgcttactaatgataacacttcaaggtattgggaacctgagttttatgaggctatgtacacaccgcatacagtcttacaggctgttggggcttgtgttctttgcaattcacagacttcattaagatgtggtgcttgcatacgtagaccattcttatgttgtaaatgctgttacgaccatgtcatatcaacatcacataaattagtcttgtctgttaatccgtatgtttgcaatgctccaggttgtgatgtcacagatgtgactcaactttacttaggaggtatgagctattattgtaaatcacataaaccacccattagttttccattgtgtgctaatggacaagtttttggtttatataaaaatacatgtgttggtagcgataatgttactgactttaatgcaattgcaacatgtgactggacaaatgctggtgattacattttagctaacacctgtactgaaagactcaagctttttgcagcagaaacgctcaaagctactgaggagacatttaaactgtcttatggtattgctactgtacgtgaagtgctgtctgacagagaattacatctttcatgggaagttggtaaacctagaccaccacttaaccgaaattatgtctttactggttatcgtgtaactaaaaacagtaaagtacaaataggagagtacacctttgaaaaaggtgactatggtgatgctgttgtttaccgaggtacaacaacttacaaattaaatgttggtgattattttgtgctgacatcacatacagtaatgccattaagtgcacctacactagtgccacaagagcactatgttagaattactggcttatacccaacactcaatatctcagatgagttttctagcaatgttgcaaattatcaaaaggttggtatgcaaaagtattctacactccagggaccacctggtactggtaagagtcattttgctattggcctagctctctactacccttctgctcgcatagtgtatacagcttgctctcatgccgctgttgatgcactatgtgagaaggcattaaaatatttgcctatagataaatgtagtagaattatacctgcacgtgctcgtgtagagtgttttgataaattcaaagtgaattcaacattagaacagtatgtcttttgtactgtaaatgcattgcctgagacgacagcagatatagttgtctttgatgaaatttcaatggccacaaattatgatttgagtgttgtcaatgccagattacgtgctaagcactatgtgtacattggcgaccctgctcaattacctgcaccacgcacattgctaactaagggcacactagaaccagaatatttcaattcagtgtgtagacttatgaaaactataggtccagacatgttcctcggaacttgtcggcgttgtcctgctgaaattgttgacactgtgagtgctttggtttatgataataagcttaaagcacataaagacaaatcagctcaatgctttaaaatgttttataagggtgttatcacgcatgatgtttcatctgcaattaacaggccacaaataggcgtggtaagagaattccttacacgtaaccctgcttggagaaaagctgtctttatttcaccttataattcacagaatgctgtagcctcaaagattttgggactaccaactcaaactgttgattcatcacagggctcagaatatgactatgtcatattcactcaaaccactgaaacagctcactcttgtaatgtaaacagatttaatgttgctattaccagagcaaaagtaggcatactttgcataatgtctgatagagacctttatgacaagttgcaatttacaagtcttgaaattccacgtaggaatgtggcaactttacaagctgaaaatgtaacaggactctttaaagattgtagtaaggtaatcactgggttacatcctacacaggcacctacacacctcagtgttgacactaaattcaaaactgaaggtttatgtgttgacatacctggcatacctaaggacatgacctatagaagactcatctctatgatgggttttaaaatgaattatcaagttaatggttaccctaacatgtttatcacccgcgaagaagctataagacatgtacgtgcatggattggcttcgatgtcgaggggtgtcatgctactagagaagctgttggtaccaatttacctttacagctaggtttttctacaggtgttaacctagttgctgtacctacaggttatgttgatacacctaataatacagatttttccagagttagtgctaaaccaccgcctggagatcaatttaaacacctcataccacttatgtacaaaggacttccttggaatgtagtgcgtataaagattgtacaaatgttaagtgacacacttaaaaatctctctgacagagtcgtatttgtcttatgggcacatggctttgagttgacatctatgaagtattttgtgaaaataggacctgagcgcacctgttgtctatgtgatagacgtgccacatgcttttccactgcttcagacacttatgcctgttggcatcattctattggatttgattacgtctataatccgtttatgattgatgttcaacaatggggttttacaggtaacctacaaagcaaccatgatctgtattgtcaagtccatggtaatgcacatgtagctagttgtgatgcaatcatgactaggtgtctagctgtccacgagtgctttgttaagcgtgttgactggactattgaatatcctataattggtgatgaactgaagattaatgcggcttgtagaaaggttcaacacatggttgttaaagctgcattattagcagacaaattcccagttcttcacgacattggtaaccctaaagctattaagtgtgtacctcaagctgatgtagaatggaagttctatgatgcacagccttgtagtgacaaagcttataaaatagaagaattattctattcttatgccacacattctgacaaattcacagatggtgtatgcctattttggaattgcaatgtcgatagatatcctgctaattccattgtttgtagatttgacactagagtgctatctaaccttaacttgcctggttgtgatggtggcagtttgtatgtaaataaacatgcattccacacaccagcttttgataaaagtgcttttgttaatttaaaacaattaccatttttctattactctgacagtccatgtgagtctcatggaaaacaagtagtgtcagatatagattatgtaccactaaagtctgctacgtgtataacacgttgcaatttaggtggtgctgtctgtagacatcatgctaatgagtacagattgtatctcgatgcttataacatgatgatctcagctggctttagcttgtgggtttacaaacaatttgatacttataacctctggaacacttttacaagacttcagagtttagaaaatgtggcttttaatgttgtaaataagggacactttgatggacaacagggtgaagtaccagtttctatcattaataacactgtttacacaaaagttgatggtgttgatgtagaattgtttgaaaataaaacaacattacctgttaatgtagcatttgagctttgggctaagcgcaacattaaaccagtaccagaggtgaaaatactcaataatttgggtgtggacattgctgctaatactgtgatctgggactacaaaagagatgctccagcacatatatctactattggtgtttgttctatgactgacatagccaagaaaccaactgaaacgatttgtgcaccactcactgtcttttttgatggtagagttgatggtcaagtagacttatttagaaatgcccgtaatggtgttcttattacagaaggtagtgttaaaggtttacaaccatctgtaggtcccaaacaagctagtcttaatggagtcacattaattggagaagccgtaaaaacacagttcaattattataagaaagttgatggtgttgtccaacaattacctgaaacttactttactcagagtagaaatttacaagaatttaaacccaggagtcaaatggaaattgatttcttagaattagctatggatgaattcattgaacggtataaattagaaggctatgccttcgaacatatcgtttatggagattttagtcatagtcagttaggtggtttacatctactgattggactagctaaacgttttaaggaatcaccttttgaattagaagattttattcctatggacagtacagttaaaaactatttcataacagatgcgcaaacaggttcatctaagtgtgtgtgttctgttattgatttattacttgatgattttgttgaaataataaaatcccaagatttatctgtagtttctaaggttgtcaaagtgactattgactatacagaaatttcatttatgctttggtgtaaagatggccatgtagaaacattttacccaaaattacaatctagtcaagcgtggcaaccgggtgttgctatgcctaatctttacaaaatgcaaagaatgctattagaaaagtgtgaccttcaaaattatggtgatagtgcaacattacctaaaggcataatgatgaatgtcgcaaaatatactcaactgtgtcaatatttaaacacattaacattagctgtaccctataatatgagagttatacattttggtgctggttctgataaaggagttgcaccaggtacagctgttttaagacagtggttgcctacgggtacgctgcttgtcgattcagatcttaatgactttgtctctgatgcagattcaactttgattggtgattgtgcaactgtacatacagctaataaatgggatctcattattagtgatatgtacgaccctaagactaaaaatgttacaaaagaaaatgactctaaagagggttttttcacttacatttgtgggtttatacaacaaaagctagctcttggaggttccgtggctataaagataacagaacattcttggaatgctgatctttataagctcatgggacacttcgcatggtggacagcctttgttactaatgtgaatgcgtcatcatctgaagcatttttaattggatgtaattatcttggcaaaccacgcgaacaaatagatggttatgtcatgcatgcaaattacatattttggaggaatacaaatccaattcagttgtcttcctattctttatttgacatgagtaaatttccccttaaattaaggggtactgctgttatgtctttaaaagaaggtcaaatcaatgatatgattttatctcttcttagtaaaggtagacttataattagagaaaacaacagagttgttatttctagtgatgttcttgttaacaactaaacgaacaatgtttgtttttcttgttttattgccactagtctctagtcagtgtgttaatcttacaaccagaactcaattaccccctgcatacactaattctttcacacgtggtgtttattaccctgacaaagttttcagatcctcagttttacattcaactcaggacttgttcttacctttcttttccaatgttacttggttccatgctatacatgtctctgggaccaatggtactaagaggtttgataaccctgtcctaccatttaatgatggtgtttattttgcttccactgagaagtctaacataataagaggctggatttttggtactactttagattcgaagacccagtccctacttattgttaataacgctactaatgttgttattaaagtctgtgaatttcaattttgtaatgatccatttttgggtgtttattaccacaaaaacaacaaaagttggatggaaagtgagttcagagtttattctagtgcgaataattgcacttttgaatatgtctctcagccttttcttatggaccttgaaggaaaacagggtaatttcaaaaatcttagggaatttgtgtttaagaatattgatggttattttaaaatatattctaagcacacgcctattaatttagtgcgtgatctccctcagggtttttcggctttagaaccattggtagatttgccaataggtattaacatcactaggtttcaaactttacttgctttacatagaagttatttgactcctggtgattcttcttcaggttggacagctggtgctgcagcttattatgtgggttatcttcaacctaggacttttctattaaaatataatgaaaatggaaccattacagatgctgtagactgtgcacttgaccctctctcagaaacaaagtgtacgttgaaatccttcactgtagaaaaaggaatctatcaaacttctaactttagagtccaaccaacagaatctattgttagatttcctaatattacaaacttgtgcccttttggtgaagtttttaacgccaccagatttgcatctgtttatgcttggaacaggaagagaatcagcaactgtgttgctgattattctgtcctatataattccgcatcattttccacttttaagtgttatggagtgtctcctactaaattaaatgatctctgctttactaatgtctatgcagattcatttgtaattagaggtgatgaagtcagacaaatcgctccagggcaaactggaaagattgctgattataattataaattaccagatgattttacaggctgcgttatagcttggaattctaacaatcttgattctaaggttggtggtaattataattacctgtatagattgtttaggaagtctaatctcaaaccttttgagagagatatttcaactgaaatctatcaggccggtagcacaccttgtaatggtgttgaaggttttaattgttactttcctttacaatcatatggtttccaacccactaatggtgttggttaccaaccatacagagtagtagtactttcttttgaacttctacatgcaccagcaactgtttgtggacctaaaaagtctactaatttggttaaaaacaaatgtgtcaatttcaacttcaatggtttaacaggcacaggtgttcttactgagtctaacaaaaagtttctgcctttccaacaatttggcagagacattgctgacactactgatgctgtccgtgatccacagacacttgagattcttgacattacaccatgttcttttggtggtgtcagtgttataacaccaggaacaaatacttctaaccaggttgctgttctttatcaggatgttaactgcacagaagtccctgttgctattcatgcagatcaacttactcctacttggcgtgtttattctacaggttctaatgtttttcaaacacgtgcaggctgtttaataggggctgaacatgtcaacaactcatatgagtgtgacatacccattggtgcaggtatatgcgctagttatcagactcagactaattctcctcggcgggcacgtagtgtagctagtcaatccatcattgcctacactatgtcacttggtgcagaaaattcagttgcttactctaataactctattgccatacccacaaattttactattagtgttaccacagaaattctaccagtgtctatgaccaagacatcagtagattgtacaatgtacatttgtggtgattcaactgaatgcagcaatcttttgttgcaatatggcagtttttgtacacaattaaaccgtgctttaactggaatagctgttgaacaagacaaaaacacccaagaagtttttgcacaagtcaaacaaatttacaaaacaccaccaattaaagattttggtggttttaatttttcacaaatattaccagatccatcaaaaccaagcaagaggtcatttattgaagatctacttttcaacaaagtgacacttgcagatgctggcttcatcaaacaatatggtgattgccttggtgatattgctgctagagacctcatttgtgcacaaaagtttaacggccttactgttttgccacctttgctcacagatgaaatgattgctcaatacacttctgcactgttagcgggtacaatcacttctggttggacctttggtgcaggtgctgcattacaaataccatttgctatgcaaatggcttataggtttaatggtattggagttacacagaatgttctctatgagaaccaaaaattgattgccaaccaatttaatagtgctattggcaaaattcaagactcactttcttccacagcaagtgcacttggaaaacttcaagatgtggtcaaccaaaatgcacaagctttaaacacgcttgttaaacaacttagctccaattttggtgcaatttcaagtgttttaaatgatatcctttcacgtcttgacaaagttgaggctgaagtgcaaattgataggttgatcacaggcagacttcaaagtttgcagacatatgtgactcaacaattaattagagctgcagaaatcagagcttctgctaatcttgctgctactaaaatgtcagagtgtgtacttggacaatcaaaaagagttgatttttgtggaaagggctatcatcttatgtccttccctcagtcagcacctcatggtgtagtcttcttgcatgtgacttatgtccctgcacaagaaaagaacttcacaactgctcctgccatttgtcatgatggaaaagcacactttcctcgtgaaggtgtctttgtttcaaatggcacacactggtttgtaacacaaaggaatttttatgaaccacaaatcattactacagacaacacatttgtgtctggtaactgtgatgttgtaataggaattgtcaacaacacagtttatgatcctttgcaacctgaattagactcattcaaggaggagttagataaatattttaagaatcatacatcaccagatgttgatttaggtgacatctctggcattaatgcttcagttgtaaacattcaaaaagaaattgaccgcctcaatgaggttgccaagaatttaaatgaatctctcatcgatctccaagaacttggaaagtatgagcagtatataaaatggccatggtacatttggctaggttttatagctggcttgattgccatagtaatggtgacaattatgctttgctgtatgaccagttgctgtagttgtctcaagggctgttgttcttgtggatcctgctgcaaatttgatgaagacgactctgagccagtgctcaaaggagtcaaattacattacacataaacgaacttatggatttgtttatgagaatcttcacaattggaactgtaactttgaagcaaggtgaaatcaaggatgctactccttcagattttgttcgcgctactgcaacgataccgatacaagcctcactccctttcggatggcttattgttggcgttgcacttcttgctgtttttcagagcgcttccaaaatcataaccctcaaaaagagatggcaactagcactctccaagggtgttcactttgtttgcaacttgctgttgttgtttgtaacagtttactcacaccttttgctcgttgctgctggccttgaagccccttttctctatctttatgctttagtctacttcttgcagagtataaactttgtaagaataataatgaggctttggctttgctggaaatgccgttccaaaaacccattactttatgatgccaactattttctttgctggcatactaattgttacgactattgtataccttacaatagtgtaacttcttcaattgtcattacttcaggtgatggcacaacaagtcctatttctgaacatgactaccagattggtggttatactgaaaaatgggaatctggagtaaaagactgtgttgtattacacagttacttcacttcagactattaccagctgtactcaactcaattgagtacagacactggtgttgaacatgttaccttcttcatctacaataaaattgttgatgagcctgaagaacatgtccaaattcacacaatcgacgtttcatccggagttgttaatccagtaatggaaccaatttatgatgaaccgacgacgactactagcgtgcctttgtaagcacaagctgatgagtacgaacttatgtactcattcgtttcggaagagacaggtacgttaatagttaatagcgtacttctttttcttgctttcgtggtattcttgctagttacactagccatccttactgcgcttcgattgtgtgcgtactgctgcaatattgttaacgtgagtcttgtaaaaccttctttttacgtttactctcgtgttaaaaatctgaattcttctagagttcctgatcttctggtctaaacgaactaaatattatattagtttttctgtttggaactttaattttagccatggcagattccaacggtactattaccgttgaagagcttaaaaagctccttgaacaatggaacctagtaataggtttcctattccttacatggatttgtcttctacaatttgcctatgccaacaggaataggtttttgtatataattaagttaattttcctctggctgttatggccagtaactttagcttgttttgtgcttgctgctgtttacagaataaattggatcaccggtggaattgctatcgcaatggcttgtcttgtaggcttgatgtggctcagctacttcattgcttctttcagactgtttgcgcgtacgcgttccatgtggtcattcaatccagaaactaacattcttctcaacgtgccactccatggcactattctgaccagaccgcttctagaaagtgaactcgtaatcggagctgtgatccttcgtggacatcttcgtattgctggacaccatctaggacgctgtgacatcaaggacctgcctaaagaaatcactgttgctacatcacgaacgctttcttattacaaattgggagcttcgcagcgtgtagcaggtgactcaggttttgctgcatacagtcgctacaggattggcaactataaattaaacacagaccattccagtagcagtgacaatattgctttgcttgtacagtaagtgacaacagatgtttcatctcgttgactttcaggttactatagcagagatattactaattattatgaggacttttaaagtttccatttggaatcttgattacatcataaacctcataattaaaaatttatctaagtcactaactgagaataaatattctcaattagatgaagagcaaccaatggagattgattaaacgaacatgaaaattattcttttcttggcactgataacactcgctacttgtgagctttatcactaccaagagtgtgttagaggtacaacagtacttttaaaagaaccttgctcttctggaacatacgagggcaattcaccatttcatcctctagctgataacaaatttgcactgacttgctttagcactcaatttgcttttgcttgtcctgacggcgtaaaacacgtctatcagttacgtgccagatcagtttcacctaaactgttcatcagacaagaggaagttcaagaactttactctccaatttttcttattgttgcggcaatagtgtttataacactttgcttcacactcaaaagaaagacagaatgattgaactttcattaattgacttctatttgtgctttttagcctttctgctattccttgttttaattatgcttattatcttttggttctcacttgaactgcaagatcataatgaaacttgtcacgcctaaacgaacatgaaatttcttgttttcttaggaatcatcacaactgtagctgcatttcaccaagaatgtagtttacagtcatgtactcaacatcaaccatatgtagttgatgacccgtgtcctattcacttctattctaaatggtatattagagtaggagctagaaaatcagcacctttaattgaattgtgcgtggatgaggctggttctaaatcacccattcagtacatcgatatcggtaattatacagtttcctgtttaccttttacaattaattgccaggaacctaaattgggtagtcttgtagtgcgttgttcgttctatgaagactttttagagtatcatgacgttcgtgttgttttagatttcatctaaacgaacaaactaaaatgtctgataatggaccccaaaatcagcgaaatgcaccccgcattacgtttggtggaccctcagattcaactggcagtaaccagaatggagaacgcagtggggcgcgatcaaaacaacgtcggccccaaggtttacccaataatactgcgtcttggttcaccgctctcactcaacatggcaaggaagaccttaaattccctcgaggacaaggcgttccaattaacaccaatagcagtccagatgaccaaattggctactaccgaagagctaccagacgaattcgtggtggtgacggtaaaatgaaagatctcagtccaagatggtatttctactacctaggaactgggccagaagctggacttccctatggtgctaacaaagacggcatcatatgggttgcaactgagggagccttgaatacaccaaaagatcacattggcacccgcaatcctgctaacaatgctgcaatcgtgctacaacttcctcaaggaacaacattgccaaaaggcttctacgcagaagggagcagaggcggcagtcaagcctcttctcgttcctcatcacgtagtcgcaacagttcaagaaattcaactccaggcagcagtaggggaacttctcctgctagaatggctggcaatggcggtgatgctgctcttgctttgctgctgcttgacagattgaaccagcttgagagcaaaatgtctggtaaaggccaacaacaacaaggccaaactgtcactaagaaatctgctgctgaggcttctaagaagcctcggcaaaaacgtactgccactaaagcatacaatgtaacacaagctttcggcagacgtggtccagaacaaacccaaggaaattttggggaccaggaactaatcagacaaggaactgattacaaacattggccgcaaattgcacaatttgcccccagcgcttcagcgttcttcggaatgtcgcgcattggcatggaagtcacaccttcgggaacgtggttgacctacacaggtgccatcaaattggatgacaaagatccaaatttcaaagatcaagtcattttgctgaataagcatattgacgcatacaaaacattcccaccaacagagcctaaaaaggacaaaaagaagaaggctgatgaaactcaagccttaccgcagagacagaagaaacagcaaactgtgactcttcttcctgctgcagatttggatgatttctccaaacaattgcaacaatccatgagcagtgctgactcaactcaggcctaaactcatgcagaccacacaaggcagatgggctatataaacgttttcgcttttccgtttacgatatatagtctactcttgtgcagaatgaattctcgtaactacatagcacaagtagatgtagttaactttaatctcacatagcaatctttaatcagtgtgtaacattagggaggacttgaaagagccaccacattttcaccgaggccacgcggagtacgatcgagtgtacagtgaacaatgctagggagagctgcctatatggaagagccctaatgtgtaaaattaattttagtagtgctatccccatgtgattttaatagcttcttaggagaat

SEQ ID NO: 10 - DNA, 29902 bp, SARS-CoV-2
ccccaaaatgctgttgtttataccttcccaggtaacaaaccaaccaactttcgatctcttgtagatctgttctctaaacgaactttaaaatctgtgtggctgtcactcggctgcatgcttagtgcactcacgcagtataattaataactaattactgtcgttgacaggacacgagtaactcgtctatcttctgcaggctgcttacggtttcgtccgtgttgcagccgatcatcagcacatctaggtttcgtccgggtgtgaccgaaaggtaagatggagagccttgtccctggtttcaacgagaaaacacacgtccaactcagtttgcctgttttacaggttcgcgacgtgctcgtacgtggctttggagactccgtggaggaggtcttatcagaggcacgtcaacatcttaaagatggcacttgtggcttagtagaagttgaaaaaggcgttttgcctcaacttgaacagccctatgtgttcatcaaacgttcggatgctcgaactgcacctcatggtcatgttatggttgagctggtagcagaactcgaaggcattcagtacggtcgtagtggtgagacacttggtgtccttgtccctcatgtgggcgaaataccagtggcttaccgcaaggttcttcttcgtaagaacggtaataaaggagctggtggccatagttacggcgccgatctaaagtcatttgacttaggcgacgagcttggcactgatccttatgaagattttcaagaaaactggaacactaaacatagcagtggtgttacccgtgaactcatgcgtgagcttaacggaggggcatacactcgctatgtcgataacaacttctgtggccctgatggctaccctcttgagtgcattaaagaccttctagcacgtgctggtaaagcttcatgcactttgtccgaacaactggactttattgacactaagaggggtgtatactgctgccgtgaacatgagcatgaaattgcttggtacacggaacgttctgaaaagagctatgaattgcagacaccttttgaaattaaattggcaaagaaatttgacaccttcaatggggaatgtccaaattttgtatttcccttaaattccataatcaagactattcaaccaagggttgaaaagaaaaagcttgatggctttatgggtagaattcgatctgtctatccagttgcgtcaccaaatgaatgcaaccaaatgtgcctttcaactctcatgaagtgtgatcattgtggtgaaacttcatggcagacgggcgattttgttaaagccacttgcgaattttgtggcactgagaatttgactaaagaaggtgccactacttgtggttacttaccccaaaatgctgttgttaaaatttattgtccagcatgtcacaattcagaagtaggacctgagcatagtcttgccgaataccataatgaatctggcttgaaaaccattcttcgtaagggtggtcgcactattgcctttggaggctgtgtgttctcttatgttggttgccataacaagtgtgcctattgggttccacgtgctagcgctaacataggttgtaaccatacaggtgttgttggagaaggttccgaaggtcttaatgacaaccttcttgaaatactccaaaaagagaaagtcaacatcaatattgttggtgactttaaacttaatgaagagatcgccattattttggcatctttttctgcttccacaagtgcttttgtggaaactgtgaaaggtttggattataaagcattcaaacaaattgttgaatcctgtggtaattttaaagttacaaaaggaaaagctaaaaaaggtgcctggaatattggtgaacagaaatcaatactgagtcctctttatgcatttgcatcagaggctgctcgtgttgtacgatcaattttctcccgcactcttgaaactgctcaaaattctgtgcgtgttttacagaaggccgctataacaatactagatggaatttcacagtattcactgagactcattgatgctatgatgttcacatctgatttggctactaacaatctagttgtaatggcctacattacaggtggtgttgttcagttgacttcgcagtggctaactaacatctttggcactgtttatgaaaaactcaaacccgtccttgattggcttgaagagaagtttaaggaaggtgtagagtttcttagagacggttgggaaattgttaaatttatctcaacctgtgcttgtgaaattgtcggtggacaaattgtcacctgtgcaaaggaaattaaggagagtgttcagacattctttaagcttgtaaataaatttttggctttgtgtgctgactctatcattattggtggagctaaacttaaagccttgaatttaggtgaaacatttgtcacgcactcaaagggattgtacagaaagtgtgttaaatccagagaagaaactggcctactcatgcctctaaaagccccaaaagaaattatcttcttagagggagaaacacttcccacagaagtgttaacagaggaagttgtcttgaaaactggtgatttacaaccattagaacaacctactagtgaagctgttgaagctccattggttggtacaccagtttgtattaacgggcttatgttgctcgaaatcaaagacacagaaaagtactgtgcccttgcacctaatatgatggtaacaaacaataccttcacactcaaaggcggtgcaccaacaaaggttacttttggtgatgacactgtgatagaagtgcaaggttacaagagtgtgaatatcacttttgaacttgatgaaaggattgataaagtacttaatgagaagtgctctgcctatacagttgaactcggtacagaagtaaatgagttcgcctgtgttgtggcagatgctgtcataaaaactttgcaaccagtatctgaattacttacaccactgggcattgatttagatgagtggagtatggctacatactacttatttgatgagtctggtgagtttaaattggcttcacatatgtattgttctttctaccctccagatgaggatgaagaagaaggtgattgtgaagaagaagagtttgagccatcaactcaatatgagtatggtactgaagatgattaccaaggtaaacctttggaatttggtgccacttctgctgctcttcaacctgaagaagagcaagaagaagattggttagatgatgatagtcaacaaactgttggtcaacaagacggcagtgaggacaatcagacaactactattcaaacaattgttgaggttcaacctcaattagagatggaacttacaccagttgttcagactattgaagtgaatagttttagtggttatttaaaacttactgacaatgtatacattaaaaatgcagacattgtggaagaagctaaaaaggtaaaaccaacagtggttgttaatgcagccaatgtttaccttaaacatggaggaggtgttgcaggagccttaaataaggctactaacaatgccatgcaagttgaatctgatgattacatagctactaatggaccacttaaagtgggtggtagttgtgttttaagcggacacaatcttgctaaacactgtcttcatgttgtcggcccaaatgttaacaaaggtgaagacattcaacttcttaagagtgcttatgaaaattttaatcagcacgaagttctacttgcaccattattatcagctggtatttttggtgctgaccctatacattctttaagagtttgtgtagatactgttcgcacaaatgtctacttagctgtctttgataaaaatctctatgacaaacttgtttcaagctttttggaaatgaagagtgaaaagcaagttgaacaaaagatcgctgagattcctaaagaggaagttaagccatttataactgaaagtaaaccttcagttgaacagagaaaacaagatgataagaaaatcaaagcttgtgttgaagaagttacaacaactctggaagaaactaagttcctcacagaaaacttgttactttatattgacattaatggcaatcttcatccagattctgccactcttgttagtgacattgacatcactttcttaaagaaagatgctccatatatagtgggtgatgttgttcaagagggtgttttaactgctgtggttatacctactaaaaaggctggtggcactactgaaatgctagcgaaagctttgagaaaagtgccaacagacaattatataaccacttacccgggtcagggtttaaatggttacactgtagaggaggcaaagacagtgcttaaaaagtgtaaaagtgccttttacattctaccatctattatctctaatgagaagcaagaaattcttggaactgtttcttggaatttgcgagaaatgcttgcacatgcagaagaaacacgcaaattaatgcctgtctgtgtggaaactaaagccatagtttcaactatacagcgtaaatataagggtattaaaatacaagagggtgtggttgattatggtgctagattttacttttacaccagtaaaacaactgtagcgtcacttatcaacacacttaacgatctaaatgaaactcttgttacaatgccacttggctatgtaacacatggcttaaatttggaagaagctgctcggtatatgagatctctcaaagtgccagctacagtttctgtttcttcacctgatgctgttacagcgtataatggttatcttacttcttcttctaaaacacctgaagaacattttattgaaaccatctcacttgctggttcctataaagattggtcctattctggacaatctacacaactaggtatagaatttcttaagagaggtgataaaagtgtatattacactagtaatcctaccacattccacctagatggtgaagttatcacctttgacaatcttaagacacttctttctttgagagaagtgaggactattaaggtgtttacaacagtagacaacattaacctccacacgcaagttgtggacatgtcaatgacatatggacaacagtttggtccaacttatttggatggagctgatgttactaaaataaaacctcataattcacatgaaggtaaaacattttatgttttacctaatgatgacactctacgtgttgaggcttttgagtactaccacacaactgatcctagttttctgggtaggtacatgtcagcattaaatcacactaaaaagtggaaatacccacaagttaatggtttaacttctattaaatgggcagataacaactgttatcttgccactgcattgttaacactccaacaaatagagttgaagtttaatccacctgctctacaagatgcttattacagagcaagggctggtgaagctgctaacttttgtgcacttatcttagcctactgtaataagacagtaggtgagttaggtgatgttagagaaacaatgagttacttgtttcaacatgccaatttagattcttgcaaaagagtcttgaacgtggtgtgtaaaacttgtggacaacagcagacaacccttaagggtgtagaagctgttatgtacatgggcacactttcttatgaacaatttaagaaaggtgttcagataccttgtacgtgtggtaaacaagctacaaaatatctagtacaacaggagtcaccttttgttatgatgtcagcaccacctgctcagtatgaacttaagcatggtacatttacttgtgctagtgagtacactggtaattaccagtgtggtcactataaacatataacttctaaagaaactttgtattgcatagacggtgctttacttacaaagtcctcagaatacaaaggtcctattacggatgttttctacaaagaaaacagttacacaacaaccataaaaccagttacttataaattggatggtgttgtttgtacagaaattgaccctaagttggacaattattataagaaagacaattcttatttcacagagcaaccaattgatcttgtaccaaaccaaccatatccaaacgcaagcttcgataattttaagtttgtatgtgataatatcaaatttgctgatgatttaaaccagttaactggttataagaaacctgcttcaagagagcttaaagttacatttttccctgacttaaatggtgatgtggtggctattgattataaacactacacaccctcttttaagaaaggagctaaattgttacataaacctattgtttggcatgttaacaatgcaactaataaagccacgtataaaccaaatacctggtgtatacgttgtctttggagcacaaaaccagttgaaacatcaaattcgtttgatgtactgaagtcagaggacgcgcagggaatggataatcttgcctgcgaagatctaaaaccagtctctgaagaagtagtggaaaatcctaccatacagaaagacgttcttgagtgtaatgtgaaaactaccgaagttgtaggagacattatacttaaaccagcaaataatagtttaaaaattacagaagaggttggccacacagatctaatggctgcttatgtagacaattctagtcttactattaagaaacctaatgaattatctagagtattaggtttgaaaacccttgctactcatggtttagctgctgttaatagtgtcccttgggatactatagctaattatgctaagccttttcttaacaaagttgttagtacaactactaacatagttacacggtgtttaaaccgtgtttgtactaattatatgccttatttctttactttattgctacaattgtgtacttttactagaagtacaaattctagaattaaagcatctatgccgactactatagcaaagaatactgttaagagtgtcggtaaattttgtctagaggcttcatttaattatttgaagtcacctaatttttctaaactgataaatattataatttggtttttactattaagtgtttgcctaggttctttaatctactcaaccgctgctttaggtgttttaatgtctaatttaggcatgccttcttactgtactggttacagagaaggctatttgaactctactaatgtcactattgcaacctactgtactggttctataccttgtagtgtttgtcttagtggtttagattctttagacacctatccttctttagaaactatacaaattaccatttcatcttttaaatgggatttaactgcttttggcttagttgcagagtggtttttggcatatattcttttcactaggtttttctatgtacttggattggctgcaatcatgcaattgtttttcagctattttgcagtacattttattagtaattcttggcttatgtggttaataattaatcttgtacaaatggccccgatttcagctatggttagaatgtacatcttctttgcatcattttattatgtatggaaaagttatgtgcatgttgtagacggttgtaattcatcaacttgtatgatgtgttacaaacgtaatagagcaacaagagtcgaatgtacaactattgttaatggtgttagaaggtccttttatgtctatgctaatggaggtaaaggcttttgcaaactacacaattggaattgtgttaattgtgatacattctgtgctggtagtacatttattagtgatgaagttgcgagagacttgtcactacagtttaaaagaccaataaatcctactgaccagtcttcttacatcgttgatagtgttacagtgaagaatggttccatccatctttactttgataaagctggtcaaaagacttatgaaagacattctctctctcattttgttaacttagacaacctgagagctaataacactaaaggttcattgcctattaatgttatagtttttgatggtaaatcaaaatgtgaagaatcatctgcaaaatcagcgtctgtttactacagtcagcttatgtgtcaacctatactgttactagatcaggcattagtgtctgatgttggtgatagtgcggaagttgcagttaaaatgtttgatgcttacgttaatacgttttcatcaacttttaacgtaccaatggaaaaactcaaaacactagttgcaactgcagaagctgaacttgcaaagaatgtgtccttagacaatgtcttatctacttttatttcagcagctcggcaagggtttgttgattcagatgtagaaactaaagatgttgttgaatgtcttaaattgtcacatcaatctgacatagaagttactggcgatagttgtaataactatatgctcacctataacaaagttgaaaacatgacaccccgtgaccttggtgcttgtattgactgtagtgcgcgtcatattaatgcgcaggtagcaaaaagtcacaacattgctttgatatggaacgttaaagatttcatgtcattgtctgaacaactacgaaaacaaatacgtagtgctgctaaaaagaataacttaccttttaagttgacatgtgcaactactagacaagttgttaatgttgtaacaacaaagatagcacttaagggtggtaaaattgttaataattggttgaagcagttaattaaagttacacttgtgttcctttttgttgctgctattttctatttaataacacctgttcatgtcatgtctaaacatactgacttttcaagtgaaatcataggatacaaggctattgatggtggtgtcactcgtgacatagcatctacagatacttgttttgctaacaaacatgctgattttgacacatggtttagccagcgtggtggtagttatactaatgacaaagcttgcccattgattgctgcagtcataacaagagaagtgggttttgtcgtgcctggtttgcctggcacgatattacgcacaactaatggtgactttttgcatttcttacctagagtttttagtgcagttggtaacatctgttacacaccatcaaaacttatagagtacactgactttgcaacatcagcttgtgttttggctgctgaatgtacaatttttaaagatgcttctggtaagccagtaccatattgttatgataccaatgtactagaaggttctgttgcttatgaaagtttacgccctgacacacgttatgtgctcatggatggctctattattcaatttcctaacacctaccttgaaggttctgttagagtggtaacaacttttgattctgagtactgtaggcacggcacttgtgaaagatcagaagctggtgtttgtgtatctactagtggtagatgggtacttaacaatgattattacagatctttaccaggagttttctgtggtgtagatgctgtaaatttacttactaatatgtttacaccactaattcaacctattggtgctttggacatatcagcatctatagtagctggtggtattgtagctatcgtagtaacatgccttgcctactattttatgaggtttagaagagcttttggtgaatacagtcatgtagttgcctttaatactttactattccttatgtcattcactgtactctgtttaacaccagtttactcattcttacctggtgtttattctgttatttacttgtacttgacattttatcttactaatgatgtttcttttttagcacatattcagtggatggttatgttcacacctttagtacctttctggataacaattgcttatatcatttgtatttccacaaagcatttctattggttctttagtaattacctaaagagacgtgtagtctttaatggtgtttcctttagtacttttgaagaagctgcgctgtgcacctttttgttaaataaagaaatgtatctaaagttgcgtagtgatgtgctattacctcttacgcaatataatagatacttagctctttataataagtacaagtattttagtggagcaatggatacaactagctacagagaagctgcttgttgtcatctcgcaaaggctctcaatgacttcagtaactcaggttctgatgttctttaccaaccaccacaaacctctatcacctcagctgttttgcagagtggttttagaaaaatggcattcccatctggtaaagttgagggttgtatggtacaagtaacttgtggtacaactacacttaacggtctttggcttgatgacgtagtttactgtccaagacatgtgatctgcacctctgaagacatgcttaaccctaattatgaagatttactcattcgtaagtctaatcataatttcttggtacaggctggtaatgttcaactcagggttattggacattctatgcaaaattgtgtacttaagcttaaggttgatacagccaatcctaagacacctaagtataagtttgttcgcattcaaccaggacagactttttcagtgttagcttgttacaatggttcaccatctggtgtttaccaatgtgctatgaggcccaatttcactattaagggttcattccttaatggttcatgtggtagtgttggttttaacatagattatgactgtgtctctttttgttacatgcaccatatggaattaccaactggagttcatgctggcacagacttagaaggtaacttttatggaccttttgttgacaggcaaacagcacaagcagctggtacggacacaactattacagttaatgttttagcttggttgtacgctgctgttataaatggagacaggtggtttctcaatcgatttaccacaactcttaatgactttaaccttgtggctatgaagtacaattatgaacctctaacacaagaccatgttgacatactaggacctctttctgctcaaactggaattgccgttttagatatgtgtgcttcattaaaagaattactgcaaaatggtatgaatggacgtaccatattgggtagtgctttattagaagatgaatttacaccttttgatgttgttagacaatgctcaggtgttactttccaaagtgcagtgaaaagaacaatcaagggtacacaccactggttgttactcacaattttgacttcacttttagttttagtccagagtactcaatggtctttgttcttttttttttatgaaaatgcctttttaccttttgctatgggtattattgctatgtctgcttttgcaatgatgtttgtcaaacataagcatgcatttctctgtttgtttttgttaccttctcttgccactgtagcttattttaatatggtctatatgcctgctagttgggtgatgcgtattatgacatggttggatatggttgatactagtttgtctggttttaagctaaaagactgtgttatgtatgcatcagctgtagtgttactaatccttatgacagcaagaactgtgtatgatgatggtgctaggagagtgtggacacttatgaatgtcttgacactcgtttataaagtttattatggtaatgctttagatcaagccatttccatgtgggctcttataatctctgttacttctaactactcaggtgtagttacaactgtcatgtttttggccagaggtattgtttttatgtgtgttgagtattgccctattttcttcataactggtaatacacttcagtgtataatgctagtttattgtttcttaggctatttttgtacttgttactttggcctcttttgtttactcaaccgctactttagactgactcttggtgtttatgattacttagtttctacacaggagtttagatatatgaattcacagggactactcccacccaagaatagcatagatgccttcaaactcaacattaaattgttgggtgttggtggcaaaccttgtatcaaagtagccactgtacagtctaaaatgtcagatgtaaagtgcacatcagtagtcttactctcagttttgcaacaactcagagtagaatcatcatctaaattgtgggctcaatgtgtccagttacacaatgacattctcttagctaaagatactactgaagcctttgaaaaaatggtttcactactttctgttttgctttccatgcagggtgctgtagacataaacaagctttgtgaagaaatgctggacaacagggcaaccttacaagctatagcctcagagtttagttcccttccatcatatgcagcttttgctactgctcaagaagcttatgagcaggctgttgctaatggtgattctgaagttgttcttaaaaagttgaagaagtctttgaatgtggctaaatctgaatttgaccgtgatgcagccatgcaacgtaagttggaaaagatggctgatcaagctatgacccaaatgtataaacaggctagatctgaggacaagagggcaaaagttactagtgctatgcagacaatgcttttcactatgcttagaaagttggataatgatgcactcaacaacattatcaacaatgcaagagatggttgtgttcccttgaacataatacctcttacaacagcagccaaactaatggttgtcataccagactataacacatataaaaatacgtgtgatggtacaacatttacttatgcatcagcattgtgggaaatccaacaggttgtagatgcagatagtaaaattgttcaacttagtgaaattagtatggacaattcacctaatttagcatggcctcttattgtaacagctttaagggccaattctgctgtcaaattacagaataatgagcttagtcctgttgcactacgacagatgtcttgtgctgccggtactacacaaactgcttgcactgatgacaatgcgttagcttactacaacacaacaaagggaggtaggtttgtacttgcactgttatccgatttacaggatttgaaatgggctagattccctaagagtgatggaactggtactatctatacagaactggaaccaccttgtaggtttgttacagacacacctaaaggtcctaaagtgaagtatttatactttattaaaggattaaacaacctaaatagaggtatggtacttggtagtttagctgccacagtacgtctacaagctggtaatgcaacagaagtgcctgccaattcaactgtattatctttctgtgcttttgctgtagatgctgctaaagcttacaaagattatctagctagtgggggacaaccaatcactaattgtgttaagatgttgtgtacacacactggtactggtcaggcaataacagttacaccggaagccaatatggatcaagaatcctttggtggtgcatcgtgttgtctgtactgccgttgccacatagatcatccaaatcctaaaggattttgtgacttaaaaggtaagtatgtacaaatacctacaacttgtgctaatgaccctgtgggttttacacttaaaaacacagtctgtaccgtctgcggtatgtggaaaggttatggctgtagttgtgatcaactccgcgaacccatgcttcagtcagctgatgcacaatcgtttttaaacgggtttgcggtgtaagtgcagcccgtcttacaccgtgcggcacaggcactagtactgatgtcgtatacagggcttttgacatctacaatgataaagtagctggttttgctaaattcctaaaaactaattgttgtcgcttccaagaaaaggacgaagatgacaatttaattgattcttactttgtagttaagagacacactttctctaactaccaacatgaagaaacaatttataatttacttaaggattgtccagctgttgctaaacatgacttctttaagtttagaatagacggtgacatggtaccacatatatcacgtcaacgtcttactaaatacacaatggcagacctcgtctatgctttaaggcattttgatgaaggtaattgtgacacattaaaagaaatacttgtcacatacaattgttgtgatgatgattatttcaataaaaaggactggtatgattttgtagaaaacccagatatattacgcgtatacgccaacttaggtgaacgtgtacgccaagctttgttaaaaacagtacaattctgtgatgccatgcgaaatgctggtattgttggtgtactgacattagataatcaagatctcaatggtaactggtatgatttcggtgatttcatacaaaccacgccaggtagtggagttcctgttgtagattcttattattcattgttaatgcctatattaaccttgaccagggctttaactgcagagtcacatgttgacactgacttaacaaagccttacattaagtgggatttgttaaaatatgacttcacggaagagaggttaaaactctttgaccgttattttaaatattgggatcagacataccacccaaattgtgttaactgtttggatgacagatgcattctgcattgtgcaaactttaatgttttattctctacagtgttcccacctacaagttttggaccactagtgagaaaaatatttgttgatggtgttccatttgtagtttcaactggataccacttcagagagctaggtgttgtacataatcaggatgtaaacttacatagctctagacttagttttaaggaattacttgtgtatgctgctgaccctgctatgcacgctgcttctggtaatctattactagataaacgcactacgtgcttttcagtagctgcacttactaacaatgttgcttttcaaactgtcaaacccggtaattttaacaaagacttctatgactttgctgtgtctaagggtttctttaaggaaggaagttctgttgaattaaaacacttcttctttgctcaggatggtaatgctgctatcagcgattatgactactatcgttataatctaccaacaatgtgtgatatcagacaactactatttgtagttgaagttgttgataagtactttgattgttacgatggtggctgtattaatgctaaccaagtcatcgtcaacaacctagacaaatcagctggttttccatttaataaatggggtaaggctagactttattatgattcaatgagttatgaggatcaagatgcacttttcgcatatacaaaacgtaatgtcatccctactataactcaaatgaatcttaagtatgccattagtgcaaagaatagagctcgcaccgtagctggtgtctctatctgtagtactatgaccaatagacagtttcatcaaaaattattgaaatcaatagccgccactagaggagctactgtagtaattggaacaagcaaattctatggtggttggcacaacatgttaaaaactgtttatagtgatgtagaaaaccctcaccttatgggttgggattatcctaaatgtgatagagccatgcctaacatgcttagaattatggcctcacttgttcttgctcgcaaacatacaacgtgttgtagcttgtcacaccgtttctatagattagctaatgagtgtgctcaagtattgagtgaaatggtcatgtgtggcggttcactatatgttaaaccaggtggaacctcatcaggagatgccacaactgcttatgctaatagtgtttttaacatttgtcaagctgtcacggccaatgttaatgcacttttatctactgatggtaacaaaattgccgataagtatgtccgcaatttacaacacagactttatgagtgtctctatagaaatagagatgttgacacagactttgtgaatgagttttacgcatatttgcgtaaacatttctcaatgatgatactctctgacgatgctgttgtgtgtttcaatagcacttatgcatctcaaggtctagtggctagcataaagaactttaagtcagttctttattatcaaaacaatgtttttatgtctgaagcaaaatgttggactgagactgaccttactaaaggacctcatgaattttgctctcaacatacaatgctagttaaacagggtgatgattatgtgtaccttccttacccagatccatcaagaatcctaggggccggctgttttgtagatgatatcgtaaaaacagatggtacacttatgattgaacggttcgtgtctttagctatagatgcttacccacttactaaacatcctaatcaggagtatgctgatgtctttcatttgtacttacaatacataagaaagctacatgatgagttaacaggacacatgttagacatgtattctgttatgcttactaatgataacacttcaaggtattgggaacctgagttttatgaggctatgtacacaccgcatacagtcttacaggctgttggggcttgtgttctttgcaattcacagacttcattaagatgtggtgcttgcatacgtagaccattcttatgttgtaaatgctgttacgaccatgtcatatcaacatcacataaattagtcttgtctgttaatccgtatgtttgcaatgctccaggttgtgatgtcacagatgtgactcaactttacttaggaggtatgagctattattgtaaatcacataaaccacccattagttttccattgtgtgctaatggacaagtttttggtttatataaaaatacatgtgttggtagcgataatgttactgactttaatgcaattgcaacatgtgactggacaaatgctggtgattacattttagctaacacctgtactgaaagactcaagctttttgcagcagaaacgctcaaagctactgaggagacatttaaactgtcttatggtattgctactgtacgtgaagtgctgtctgacagagaattacatctttcatgggaagttggtaaacctagaccaccacttaaccgaaattatgtctttactggttatcgtgtaactaaaaacagtaaagtacaaataggagagtacacctttgaaaaaggtgactatggtgatgctgttgtttaccgaggtacaacaacttacaaattaaatgttggtgattattttgtgctgacatcacatacagtaatgccattaagtgcacctacactagtgccacaagagcactatgttagaattactggcttatacccaacactcaatatctcagatgagttttctagcaatgttgcaaattatcaaaaggttggtatgcaaaagtattctacactccagggaccacctggtactggtaagagtcattttgctattggcctagctctctactacccttctgctcgcatagtgtatacagcttgctctcatgccgctgttgatgcactatgtgagaaggcattaaaatatttgcctatagataaatgtagtagaattatacctgcacgtgctcgtgtagagtgttttgataaattcaaagtgaattcaacattagaacagtatgtcttttgtactgtaaatgcattgcctgagacgacagcagatatagttgtctttgatgaaatttcaatggccacaaattatgatttgagtgttgtcaatgccagattacgtgctaagcactatgtgtacattggcgaccctgctcaattacctgcaccacgcacattgctaactaagggcacactagaaccagaatatttcaattcagtgtgtagacttatgaaaactataggtccagacatgttcctcggaacttgtcggcgttgtcctgctgaaattgttgacactgtgagtgctttggtttatgataataagcttaaagcacataaagacaaatcagctcaatgctttaaaatgttttataagggtgttatcacgcatgatgtttcatctgcaattaacaggccacaaataggcgtggtaagagaattccttacacgtaaccctgcttggagaaaagctgtctttatttcaccttataattcacagaatgctgtagcctcaaagattttgggactaccaactcaaactgttgattcatcacagggctcagaatatgactatgtcatattcactcaaaccactgaaacagctcactcttgtaatgtaaacagatttaatgttgctattaccagagcaaaagtaggcatactttgcataatgtctgatagagacctttatgacaagttgcaatttacaagtcttgaaattccacgtaggaatgtggcaactttacaagctgaaaatgtaacaggactctttaaagattgtagtaaggtaatcactgggttacatcctacacaggcacctacacacctcagtgttgacactaaattcaaaactgaaggtttatgtgttgacatacctggcatacctaaggacatgacctatagaagactcatctctatgatgggttttaaaatgaattatcaagttaatggttaccctaacatgtttatcacccgcgaagaagctataagacatgtacgtgcatggattggcttcgatgtcgaggggtgtcatgctactagagaagctgttggtaccaatttacctttacagctaggtttttctacaggtgttaacctagttgctgtacctacaggttatgttgatacacctaataatacagatttttccagagttagtgctaaaccaccgcctggagatcaatttaaacacctcataccacttatgtacaaaggacttccttggaatgtagtgcgtataaagattgtacaaatgttaagtgacacacttaaaaatctctctgacagagtcgtatttgtcttatgggcacatggctttgagttgacatctatgaagtattttgtgaaaataggacctgagcgcacctgttgtctatgtgatagacgtgccacatgcttttccactgcttcagacacttatgcctgttggcatcattctattggatttgattacgtctataatccgtttatgattgatgttcaacaatggggttttacaggtaacctacaaagcaaccatgatctgtattgtcaagtccatggtaatgcacatgtagctagttgtgatgcaatcatgactaggtgtctagctgtccacgagtgctttgttaagcgtgttgactggactattgaatatcctataattggtgatgaactgaagattaatgcggcttgtagaaaggttcaacacatggttgttaaagctgcattattagcagacaaattcccagttcttcacgacattggtaaccctaaagctattaagtgtgtacctcaagctgatgtagaatggaagttctatgatgcacagccttgtagtgacaaagcttataaaatagaagaattattctattcttatgccacacattctgacaaattcacagatggtgtatgcctattttggaattgcaatgtcgatagatatcctgctaattccattgtttgtagatttgacactagagtgctatctaaccttaacttgcctggttgtgatggtggcagtttgtatgtaaataaacatgcattccacacaccagcttttgataaaagtgcttttgttaatttaaaacaattaccatttttctattactctgacagtccatgtgagtctcatggaaaacaagtagtgtcagatatagattatgtaccactaaagtctgctacgtgtataacacgttgcaatttaggtggtgctgtctgtagacatcatgctaatgagtacagattgtatctcgatgcttataacatgatgatctcagctggctttagcttgtgggtttacaaacaatttgatacttataacctctggaacacttttacaagacttcagagtttagaaaatgtggcttttaatgttgtaaataagggacactttgatggacaacagggtgaagtaccagtttctatcattaataacactgtttacacaaaagttgatggtgttgatgtagaattgtttgaaaataaaacaacattacctgttaatgtagcatttgagctttgggctaagcgcaacattaaaccagtaccagaggtgaaaatactcaataatttgggtgtggacattgctgctaatactgtgatctgggactacaaaagagatgctccagcacatatatctactattggtgtttgttctatgactgacatagccaagaaaccaactgaaacgatttgtgcaccactcactgtcttttttgatggtagagttgatggtcaagtagacttatttagaaatgcccgtaatggtgttcttattacagaaggtagtgttaaaggtttacaaccatctgtaggtcccaaacaagctagtcttaatggagtcacattaattggagaagccgtaaaaacacagttcaattattataagaaagttgatggtgttgtccaacaattacctgaaacttactttactcagagtagaaatttacaagaatttaaacccaggagtcaaatggaaattgatttcttagaattagctatggatgaattcattgaacggtataaattagaaggctatgccttcgaacatatcgtttatggagattttagtcatagtcagttaggtggtttacatctactgattggactagctaaacgttttaaggaatcaccttttgaattagaagattttattcctatggacagtacagttaaaaactatttcataacagatgcgcaaacaggttcatctaagtgtgtgtgttctgttattgatttattacttgatgattttgttgaaataataaaatcccaagatttatctgtagtttctaaggttgtcaaagtgactattgactatacagaaatttcatttatgctttggtgtaaagatggccatgtagaaacattttacccaaaattacaatctagtcaagcgtggcaaccgggtgttgctatgcctaatctttacaaaatgcaaagaatgctattagaaaagtgtgaccttcaaaattatggtgatagtgcaacattacctaaaggcataatgatgaatgtcgcaaaatatactcaactgtgtcaatatttaaacacattaacattagctgtaccctataatatgagagttatacattttggtgctggttctgataaaggagttgcaccaggtacagctgttttaagacagtggttgcctacgggtacgctgcttgtcgattcagatcttaatgactttgtctctgatgcagattcaactttgattggtgattgtgcaactgtacatacagctaataaatgggatctcattattagtgatatgtacgaccctaagactaaaaatgttacaaaagaaaatgactctaaagagggttttttcacttacatttgtgggtttatacaacaaaagctagctcttggaggttccgtggctataaagataacagaacattcttggaatgctgatctttataagctcatgggacacttcgcatggtggacagcctttgttactaatgtgaatgcgtcatcatctgaagcatttttaattggatgtaattatcttggcaaaccacgcgaacaaatagatggttatgtcatgcatgcaaattacatattttggaggaatacaaatccaattcagttgtcttcctattctttatttgacatgagtaaatttccccttaaattaaggggtactgctgttatgtctttaaaagaaggtcaaatcaatgatatgattttatctcttcttagtaaaggtagacttataattagagaaaacaacagagttgttatttctagtgatgttcttgttaacaactaaacgaacaatgtttgtttttcttgttttattgccactagtctctagtcagtgtgttaatcttacaaccagaactcaattaccccctgcatacactaattctttcacacgtggtgtttattaccctgacaaagttttcagatcctcagttttacattcaactcaggacttgttcttacctttcttttccaatgttacttggttccatgctatacatgtctctgggaccaatggtactaagaggtttgataaccctgtcctaccatttaatgatggtgtttattttgcttccactgagaagtctaacataataagaggctggatttttggtactactttagattcgaagacccagtccctacttattgttaataacgctactaatgttgttattaaagtctgtgaatttcaattttgtaatgatccatttttgggtgtttattaccacaaaaacaacaaaagttggatggaaagtgagttcagagtttattctagtgcgaataattgcacttttgaatatgtctctcagccttttcttatggaccttgaaggaaaacagggtaatttcaaaaatcttagggaatttgtgtttaagaatattgatggttattttaaaatatattctaagcacacgcctattaatttagtgcgtgatctccctcagggtttttcggctttagaaccattggtagatttgccaataggtattaacatcactaggtttcaaactttacttgctttacatagaagttatttgactcctggtgattcttcttcaggttggacagctggtgctgcagcttattatgtgggttatcttcaacctaggacttttctattaaaatataatgaaaatggaaccattacagatgctgtagactgtgcacttgaccctctctcagaaacaaagtgtacgttgaaatccttcactgtagaaaaaggaatctatcaaacttctaactttagagtccaaccaacagaatctattgttagatttcctaatattacaaacttgtgcccttttggtgaagtttttaacgccaccagatttgcatctgtttatgcttggaacaggaagagaatcagcaactgtgttgctgattattctgtcctatataattccgcatcattttccacttttaagtgttatggagtgtctcctactaaattaaatgatctctgctttactaatgtctatgcagattcatttgtaattagaggtgatgaagtcagacaaatcgctccagggcaaactggaaagattgctgattataattataaattaccagatgattttacaggctgcgttatagcttggaattctaacaatcttgattctaaggttggtggtaattataattacctgtatagattgtttaggaagtctaatctcaaaccttttgagagagatatttcaactgaaatctatcaggccggtagcacaccttgtaatggtgttgaaggttttaattgttactttcctttacaatcatatggtttccaacccactaatggtgttggttaccaaccatacagagtagtagtactttcttttgaacttctacatgcaccagcaactgtttgtggacctaaaaagtctactaatttggttaaaaacaaatgtgtcaatttcaacttcaatggtttaacaggcacaggtgttcttactgagtctaacaaaaagtttctgcctttccaacaatttggcagagacattgctgacactactgatgctgtccgtgatccacagacacttgagattcttgacattacaccatgttcttttggtggtgtcagtgttataacaccaggaacaaatacttctaaccaggttgctgttctttatcaggatgttaactgcacagaagtccctgttgctattcatgcagatcaacttactcctacttggcgtgtttattctacaggttctaatgtttttcaaacacgtgcaggctgtttaataggggctgaacatgtcaacaactcatatgagtgtgacatacccattggtgcaggtatatgcgctagttatcagactcagactaattctcctcggcgggcacgtagtgtagctagtcaatccatcattgcctacactatgtcacttggtgcagaaaattcagttgcttactctaataactctattgccatacccacaaattttactattagtgttaccacagaaattctaccagtgtctatgaccaagacatcagtagattgtacaatgtacatttgtggtgattcaactgaatgcagcaatcttttgttgcaatatggcagtttttgtacacaattaaaccgtgctttaactggaatagctgttgaacaagacaaaaacacccaagaagtttttgcacaagtcaaacaaatttacaaaacaccaccaattaaagattttggtggttttaatttttcacaaatattaccagatccatcaaaaccaagcaagaggtcatttattgaagatctacttttcaacaaagtgacacttgcagatgctggcttcatcaaacaatatggtgattgccttggtgatattgctgctagagacctcatttgtgcacaaaagtttaacggccttactgttttgccacctttgctcacagatgaaatgattgctcaatacacttctgcactgttagcgggtacaatcacttctggttggacctttggtgcaggtgctgcattacaaataccatttgctatgcaaatggcttataggtttaatggtattggagttacacagaatgttctctatgagaaccaaaaattgattgccaaccaatttaatagtgctattggcaaaattcaagactcactttcttccacagcaagtgcacttggaaaacttcaagatgtggtcaaccaaaatgcacaagctttaaacacgcttgttaaacaacttagctccaattttggtgcaatttcaagtgttttaaatgatatcctttcacgtcttgacaaagttgaggctgaagtgcaaattgataggttgatcacaggcagacttcaaagtttgcagacatatgtgactcaacaattaattagagctgcagaaatcagagcttctgctaatcttgctgctactaaaatgtcagagtgtgtacttggacaatcaaaaagagttgatttttgtggaaagggctatcatcttatgtccttccctcagtcagcacctcatggtgtagtcttcttgcatgtgacttatgtccctgcacaagaaaagaacttcacaactgctcctgccatttgtcatgatggaaaagcacactttcctcgtgaaggtgtctttgtttcaaatggcacacactggtttgtaacacaaaggaatttttatgaaccacaaatcattactacagacaacacatttgtgtctggtaactgtgatgttgtaataggaattgtcaacaacacagtttatgatcctttgcaacctgaattagactcattcaaggaggagttagataaatattttaagaatcatacatcaccagatgttgatttaggtgacatctctggcattaatgcttcagttgtaaacattcaaaaagaaattgaccgcctcaatgaggttgccaagaatttaaatgaatctctcatcgatctccaagaacttggaaagtatgagcagtatataaaatggccatggtacatttggctaggttttatagctggcttgattgccatagtaatggtgacaattatgctttgctgtatgaccagttgctgtagttgtctcaagggctgttgttcttgtggatcctgctgcaaatttgatgaagacgactctgagccagtgctcaaaggagtcaaattacattacacataaacgaacttatggatttgtttatgagaatcttcacaattggaactgtaactttgaagcaaggtgaaatcaaggatgctactccttcagattttgttcgcgctactgcaacgataccgatacaagcctcactccctttcggatggcttattgttggcgttgcacttcttgctgtttttcagagcgcttccaaaatcataaccctcaaaaagagatggcaactagcactctccaagggtgttcactttgtttgcaacttgctgttgttgtttgtaacagtttactcacaccttttgctcgttgctgctggccttgaagccccttttctctatctttatgctttagtctacttcttgcagagtataaactttgtaagaataataatgaggctttggctttgctggaaatgccgttccaaaaacccattactttatgatgccaactattttctttgctggcatactaattgttacgactattgtataccttacaatagtgtaacttcttcaattgtcattacttcaggtgatggcacaacaagtcctatttctgaacatgactaccagattggtggttatactgaaaaatgggaatctggagtaaaagactgtgttgtattacacagttacttcacttcagactattaccagctgtactcaactcaattgagtacagacactggtgttgaacatgttaccttcttcatctacaataaaattgttgatgagcctgaagaacatgtccaaattcacacaatcgacggttcatccggagttgttaatccagtaatggaaccaatttatgatgaaccgacgacgactactagcgtgcctttgtaagcacaagctgatgagtacgaacttatgtactcattcgtttcggaagagacaggtacgttaatagttaatagcgtacttctttttcttgctttcgtggtattcttgctagttacactagccatccttactgcgcttcgattgtgtgcgtactgctgcaatattgttaacgtgagtcttgtaaaaccttctttttacgtttactctcgtgttaaaaatctgaattcttctagagttcctgatcttctggtctaaacgaactaaatattatattagtttttctgtttggaactttaattttagccatggcagattccaacggtactattaccgttgaagagcttaaaaagctccttgaacaatggaacctagtaataggtttcctattccttacatggatttgtcttctacaatttgcctatgccaacaggaataggtttttgtatataattaagttaattttcctctggctgttatggccagtaactttagcttgttttgtgcttgctgctgtttacagaataaattggatcaccggtggaattgctatcgcaatggcttgtcttgtaggcttgatgtggctcagctacttcattgcttctttcagactgtttgcgcgtacgcgttccatgtggtcattcaatccagaaactaacattcttctcaacgtgccactccatggcactattctgaccagaccgcttctagaaagtgaactcgtaatcggagctgtgatccttcgtggacatcttcgtattgctggacaccatctaggacgctgtgacatcaaggacctgcctaaagaaatcactgttgctacatcacgaacgctttcttattacaaattgggagcttcgcagcgtgtagcaggtgactcaggttttgctgcatacagtcgctacaggattggcaactataaattaaacacagaccattccagtagcagtgacaatattgctttgcttgtacagtaagtgacaacagatgtttcatctcgttgactttcaggttactatagcagagatattactaattattatgaggacttttaaagtttccatttggaatcttgattacatcataaacctcataattaaaaatttatctaagtcactaactgagaataaatattctcaattagatgaagagcaaccaatggagattgattaaacgaacatgaaaattattcttttcttggcactgataacactcgctacttgtgagctttatcactaccaagagtgtgttagaggtacaacagtacttttaaaagaaccttgctcttctggaacatacgagggcaattcaccatttcatcctctagctgataacaaatttgcactgacttgctttagcactcaatttgcttttgcttgtcctgacggcgtaaaacacgtctatcagttacgtgccagatcagtttcacctaaactgttcatcagacaagaggaagttcaagaactttactctccaatttttcttattgttgcggcaatagtgtttataacactttgcttcacactcaaaagaaagacagaatgattgaactttcattaattgacttctatttgtgctttttagcctttctgctattccttgttttaattatgcttattatcttttggttctcacttgaactgcaagatcataatgaaacttgtcacgcctaaacgaacatgaaatttcttgttttcttaggaatcatcacaactgtagctgcatttcaccaagaatgtagtttacagtcatgtactcaacatcaaccatatgtagttgatgacccgtgtcctattcacttctattctaaatggtatattagagtaggagctagaaaatcagcacctttaattgaattgtgcgtggatgaggctggttctaaatcacccattcagtacatcgatatcggtaattatacagtttcctgtttaccttttacaattaattgccaggaacctaaattgggtagtcttgtagtgcgttgttcgttctatgaagactttttagagtatcatgacgttcgtgttgttttagatttcatctaaacgaacaaactaaaatgtctgataatggaccccaaaatcagcgaaatgcaccccgcattacgtttggtggaccctcagattcaactggcagtaaccagaatggagaacgcagtggggcgcgatcaaaacaacgtcggccccaaggtttacccaataatactgcgtcttggttcaccgctctcactcaacatggcaaggaagaccttaaattccctcgaggacaaggcgttccaattaacaccaatagcagtccagatgaccaaattggctactaccgaagagctaccagacgaattcgtggtggtgacggtaaaatgaaagatctcagtccaagatggtatttctactacctaggaactgggccagaagctggacttccctatggtgctaacaaagacggcatcatatgggttgcaactgagggagccttgaatacaccaaaagatcacattggcacccgcaatcctgctaacaatgctgcaatcgtgctacaacttcctcaaggaacaacattgccaaaaggcttctacgcagaagggagcagaggcggcagtcaagcctcttctcgttcctcatcacgtagtcgcaacagttcaagaaattcaactccaggcagcagtaggggaacttctcctgctagaatggctggcaatggcggtgatgctgctcttgctttgctgctgcttgacagattgaaccagcttgagagcaaaatgtctggtaaaggccaacaacaacaaggccaaactgtcactaagaaatctgctgctgaggcttctaagaagcctcggcaaaaacgtactgccactaaagcatacaatgtaacacaagctttcggcagacgtggtccagaacaaacccaaggaaattttggggaccaggaactaatcagacaaggaactgattacaaacattggccgcaaattgcacaatttgcccccagcgcttcagcgttcttcggaatgtcgcgcattggcatggaagtcacaccttcgggaacgtggttgacctacacaggtgccatcaaattggatgacaaagatccaaatttcaaagatcaagtcattttgctgaataagcatattgacgcatacaaaacattcccaccaacagagcctaaaaaggacaaaaagaagaaggctgatgaaactcaagccttaccgcagagacagaagaaacagcaaactgtgactcttcttcctgctgcagatttggatgatttctccaaacaattgcaacaatccatgagcagtgctgactcaactcaggcctaaactcatgcagaccacacaaggcagatgggctatataaacgttttcgcttttccgtttacgatatatagtctactcttgtgcagaatgaattctcgtaactatatagcacaagtagatgtagttaactttaatctcacatagcaatctttaatcagtgtgtaacattagggaggacttgaaagagccaccacattttcaccgaggccacgcggagtacgatcgagtgtacagtgaacaatgctagggagagctgcctatatggaagagccctaatgtgtaaaattaattttagtagtgctatccccatgtgattttaatagcttcttaggagaatgacaaaaacagtgaacaatgctaggga

SEQ ID NO: 11 - DNA, 29751 bp, SARS coronavirus
atattaggtttttacctacccaggaaaagccaaccaacctcgatctcttgtagatctgttctctaaacgaactttaaaatctgtgtagctgtcgctcggctgcatgcctagtgcacctacgcagtataaacaataataaattttactgtcgttgacaagaaacgagtaactcgtccctcttctgcagactgcttacggtttcgtccgtgttgcagtcgatcatcagcatacctaggtttcgtccgggtgtgaccgaaaggtaagatggagagccttgttcttggtgtcaacgagaaaacacacgtccaactcagtttgcctgtccttcaggttagagacgtgctagtgcgtggcttcggggactctgtggaagaggccctatcggaggcacgtgaacacctcaaaaatggcacttgtggtctagtagagctggaaaaaggcgtactgccccagcttgaacagccctatgtgttcattaaacgttctgatgccttaagcaccaatcacggccacaaggtcgttgagctggttgcagaaatggacggcattcagtacggtcgtagcggtataacactgggagtactcgtgccacatgtgggcgaaaccccaattgcataccgcaatgttcttcttcgtaagaacggtaataagggagccggtggtcatagctatggcatcgatctaaagtcttatgacttaggtgacgagcttggcactgatcccattgaagattatgaacaaaactggaacactaagcatggcagtggtgcactccgtgaactcactcgtgagctcaatggaggtgcagtcactcgctatgtcgacaacaatttctgtggcccagatgggtaccctcttgattgcatcaaagattttctcgcacgcgcgggcaagtcaatgtgcactctttccgaacaacttgattacatcgagtcgaagagaggtgtctactgctgccgtgaccatgagcatgaaattgcctggttcactgagcgctctgataagagctacgagcaccagacacccttcgaaattaagagtgccaagaaatttgacactttcaaaggggaatgcccaaagtttgtgtttcctcttaactcaaaagtcaaagtcattcaaccacgtgttgaaaagaaaaagactgagggtttcatggggcgtatacgctctgtgtaccctgttgcatctccacaggagtgtaacaatatgcacttgtctaccttgatgaaatgtaatcattgcgatgaagtttcatggcagacgtgcgactttctgaaagccacttgtgaacattgtggcactgaaaatttagttattgaaggacctactacatgtgggtacctacctactaatgctgtagtgaaaatgccatgtcctgcctgtcaagacccagagattggacctgagcatagtgttgcagattatcacaaccactcaaacattgaaactcgactccgcaagggaggtaggactagatgttttggaggctgtgtgtttgcctatgttggctgctataataagcgtgcctactgggttcctcgtgctagtgctgatattggctcaggccatactggcattactggtgacaatgtggagaccttgaatgaggatctccttgagatactgagtcgtgaacgtgttaacattaacattgttggcgattttcatttgaatgaagaggttgccatcattttggcatctttctctgcttctacaagtgcctttattgacactataaagagtcttgattacaagtctttcaaaaccattgttgagtcctgcggtaactataaagttaccaagggaaagcccgtaaaaggtgcttggaacattggacaacagagatcagttttaacaccactgtgtggttttccctcacaggctgctggtgttatcagatcaatttttgcgcgcacacttgatgcagcaaaccactcaattcctgatttgcaaagagcagctgtcaccatacttgatggtatttctgaacagtcattacgtcttgtcgacgccatggtttatacttcagacctgctcaccaacagtgtcattattatggcatatgtaactggtggtcttgtacaacagacttctcagtggttgtctaatcttttgggcactactgttgaaaaactcaggcctatctttgaatggattgaggcgaaacttagtgcaggagttgaatttctcaaggatgcttgggagattctcaaatttctcattacaggtgtttttgacatcgtcaagggtcaaatacaggttgcttcagataacatcaaggattgtgtaaaatgcttcattgatgttgttaacaaggcactcgaaatgtgcattgatcaagtcactatcgctggcgcaaagttgcgatcactcaacttaggtgaagtcttcatcgctcaaagcaagggactttaccgtcagtgtatacgtggcaaggagcagctgcaactactcatgcctcttaaggcaccaaaagaagtaacctttcttgaaggtgattcacatgacacagtacttacctctgaggaggttgttctcaagaacggtgaactcgaagcactcgagacgcccgttgatagcttcacaaatggagctatcgttggcacaccagtctgtgtaaatggcctcatgctcttagagattaaggacaaagaacaatactgcgcattgtctcctggtttactggctacaaacaatgtctttcgcttaaaagggggtgcaccaattaaaggtgtaacctttggagaagatactgtttgggaagttcaaggttacaagaatgtgagaatcacatttgagcttgatgaacgtgttgacaaagtgcttaatgaaaagtgctctgtctacactgttgaatccggtaccgaagttactgagtttgcatgtgttgtagcagaggctgttgtgaagactttacaaccagtttctgatctccttaccaacatgggtattgatcttgatgagtggagtgtagctacattctacttatttgatgatgctggtgaagaaaacttttcatcacgtatgtattgttccttttaccctccagatgaggaagaagaggacgatgcagagtgtgaggaagaagaaattgatgaaacctgtgaacatgagtacggtacagaggatgattatcaaggtctccctctggaatttggtgcctcagctgaaacagttcgagttgaggaagaagaagaggaagactggctggatgatactactgagcaatcagagattgagccagaaccagaacctacacctgaagaaccagttaatcagtttactggttatttaaaacttactgacaatgttgccattaaatgtgttgacatcgttaaggaggcacaaagtgctaatcctatggtgattgtaaatgctgctaacatacacctgaaacatggtggtggtgtagcaggtgcactcaacaaggcaaccaatggtgccatgcaaaaggagagtgatgattacattaagctaaatggccctcttacagtaggagggtcttgtttgctttctggacataatcttgctaagaagtgtctgcatgttgttggacctaacctaaatgcaggtgaggacatccagcttcttaaggcagcatatgaaaatttcaattcacaggacatcttacttgcaccattgttgtcagcaggcatatttggtgctaaaccacttcagtctttacaagtgtgcgtgcagacggttcgtacacaggtttatattgcagtcaatgacaaagctctttatgagcaggttgtcatggattatcttgataacctgaagcctagagtggaagcacctaaacaagaggagccaccaaacacagaagattccaaaactgaggagaaatctgtcgtacagaagcctgtcgatgtgaagccaaaaattaaggcctgcattgatgaggttaccacaacactggaagaaactaagtttcttaccaataagttactcttgtttgctgatatcaatggtaagctttaccatgattctcagaacatgcttagaggtgaagatatgtctttccttgagaaggatgcaccttacatggtaggtgatgttatcactagtggtgatatcacttgtgttgtaataccctccaaaaaggctggtggcactactgagatgctctcaagagctttgaagaaagtgccagttgatgagtatataaccacgtaccctggacaaggatgtgctggttatacacttgaggaagctaagactgctcttaagaaatgcaaatctgcattttatgtactaccttcagaagcacctaatgctaaggaagagattctaggaactgtatcctggaatttgagagaaatgcttgctcatgctgaagagacaagaaaattaatgcctatatgcatggatgttagagccataatggcaaccatccaacgtaagtataaaggaattaaaattcaagagggcatcgttgactatggtgtccgattcttcttttatactagtaaagagcctgtagcttctattattacgaagctgaactctctaaatgagccgcttgtcacaatgccaattggttatgtgacacatggttttaatcttgaagaggctgcgcgctgtatgcgttctcttaaagctcctgccgtagtgtcagtatcatcaccagatgctgttactacatataatggatacctcacttcgtcatcaaagacatctgaggagcactttgtagaaacagtttctttggctggctcttacagagattggtcctattcaggacagcgtacagagttaggtgttgaatttcttaagcgtggtgacaaaattgtgtaccacactctggagagccccgtcgagtttcatcttgacggtgaggttctttcacttgacaaactaaagagtctcttatccctgcgggaggttaagactataaaagtgttcacaactgtggacaacactaatctccacacacagcttgtggatatgtctatgacatatggacagcagtttggtccaacatacttggatggtgctgatgttacaaaaattaaacctcatgtaaatcatgagggtaagactttctttgtactacctagtgatgacacactacgtagtgaagctttcgagtactaccatactcttgatgagagttttcttggtaggtacatgtctgctttaaaccacacaaagaaatggaaatttcctcaagttggtggtttaacttcaattaaatgggctgataacaattgttatttgtctagtgttttattagcacttcaacagcttgaagtcaaattcaatgcaccagcacttcaagaggcttattatagagcccgtgctggtgatgctgctaacttttgtgcactcatactcgcttacagtaataaaactgttggcgagcttggtgatgtcagagaaactatgacccatcttctacagcatgctaatttggaatctgcaaagcgagttcttaatgtggtgtgtaaacattgtggtcagaaaactactaccttaacgggtgtagaagctgtgatgtatatgggtactctatcttatgataatcttaagacaggtgtttccattccatgtgtgtgtggtcgtgatgctacacaatatctagtacaacaagagtcttcttttgttatgatgtctgcaccacctgctgagtataaattacagcaaggtacattcttatgtgcgaatgagtacactggtaactatcagtgtggtcattacactcatataactgctaaggagaccctctatcgtattgacggagctcaccttacaaagatgtcagagtacaaaggaccagtgactgatgttttctacaaggaaacatcttacactacaaccatcaagcctgtgtcgtataaactcgatggagttacttacacagagattgaaccaaaattggatgggtattataaaaaggataatgcttactatacagagcagcctatagaccttgtaccaactcaaccattaccaaatgcgagttttgataatttcaaactcacatgttctaacacaaaatttgctgatgatttaaatcaaatgacaggcttcacaaagccagcttcacgagagctatctgtcacattcttcccagacttgaatggcgatgtagtggctattgactatagacactattcagcgagtttcaagaaaggtgctaaattactgcataagccaattgtttggcacattaaccaggctacaaccaagacaacgttcaaaccaaacacttggtgtttacgttgtctttggagtacaaagccagtagatacttcaaattcatttgaagttctggcagtagaagacacacaaggaatggacaatcttgcttgtgaaagtcaacaacccacctctgaagaagtagtggaaaatcctaccatacagaaggaagtcatagagtgtgacgtgaaaactaccgaagttgtaggcaatgtcatacttaaaccatcagatgaaggtgttaaagtaacacaagagttaggtcatgaggatcttatggctgcttatgtggaaaacacaagcattaccattaagaaacctaatgagctttcactagccttaggtttaaaaacaattgccactcatggtattgctgcaattaatagtgttccttggagtaaaattttggcttatgtcaaaccattcttaggacaagcagcaattacaacatcaaattgcgctaagagattagcacaacgtgtgtttaacaattatatgccttatgtgtttacattattgttccaattgtgtacttttactaaaagtaccaattctagaattagagcttcactacctacaactattgctaaaaatagtgttaagagtgttgctaaattatgtttggatgccggcattaattatgtgaagtcacccaaattttctaaattgttcacaatcgctatgtggctattgttgttaagtatttgcttaggttctctaatctgtgtaactgctgcttttggtgtactcttatctaattttggtgctccttcttattgtaatggcgttagagaattgtatcttaattcgtctaacgttactactatggatttctgtgaaggttcttttccttgcagcatttgtttaagtggattagactcccttgattcttatccagctcttgaaaccattcaggtgacgatttcatcgtacaagctagacttgacaattttaggtctggccgctgagtgggttttggcatatatgttgttcacaaaattcttttatttattaggtctttcagctataatgcaggtgttctttggctattttgctagtcatttcatcagcaattcttggctcatgtggtttatcattagtattgtacaaatggcacccgtttctgcaatggttaggatgtacatcttctttgcttctttctactacatatggaagagctatgttcatatcatggatggttgcacctcttcgacttgcatgatgtgctataagcgcaatcgtgccacacgcgttgagtgtacaactattgttaatggcatgaagagatctttctatgtctatgcaaatggaggccgtggcttctgcaagactcacaattggaattgtctcaattgtgacacattttgcactggtagtacattcattagtgatgaagttgctcgtgatttgtcactccagtttaaaagaccaatcaaccctactgaccagtcatcgtatattgttgatagtgttgctgtgaaaaatggcgcgcttcacctctactttgacaaggctggtcaaaagacctatgagagacatccgctctcccattttgtcaatttagacaatttgagagctaacaacactaaaggttcactgcctattaatgtcatagtttttgatggcaagtccaaatgcgacgagtctgcttctaagtctgcttctgtgtactacagtcagctgatgtgccaacctattctgttgcttgaccaagctcttgtatcagacgttggagatagtactgaagtttccgttaagatgtttgatgcttatgtcgacaccttttcagcaacttttagtgttcctatggaaaaacttaaggcacttgttgctacagctcacagcgagttagcaaagggtgtagctttagatggtgtcctttctacattcgtgtcagctgcccgacaaggtgttgttgataccgatgttgacacaaaggatgttattgaatgtctcaaactttcacatcactctgacttagaagtgacaggtgacagttgtaacaatttcatgctcacctataataaggttgaaaacatgacgcccagagatcttggcgcatgtattgactgtaatgcaaggcatatcaatgcccaagtagcaaaaagtcacaatgtttcactcatctggaatgtaaaagactacatgtctttatctgaacagctgcgtaaacaaattcgtagtgctgccaagaagaacaacataccttttagactaacttgtgctacaactagacaggttgtcaatgtcataactactaaaatctcactcaagggtggtaagattgttagtacttgttttaaacttatgcttaaggccacattattgtgcgttcttgctgcattggtttgttatatcgttatgccagtacatacattgtcaatccatgatggttacacaaatgaaatcattggttacaaagccattcaggatggtgtcactcgtgacatcatttctactgatgattgttttgcaaataaacatgctggttttgacgcatggtttagccagcgtggtggttcatacaaaaatgacaaaagctgccctgtagtagctgctatcattacaagagagattggtttcatagtgcctggcttaccgggtactgtgctgagagcaatcaatggtgacttcttgcattttctacctcgtgtttttagtgctgttggcaacatttgctacacaccttccaaactcattgagtatagtgattttgctacctctgcttgcgttcttgctgctgagtgtacaatttttaaggatgctatgggcaaacctgtgccatattgttatgacactaatttgctagagggttctatttcttatagtgagcttcgtccagacactcgttatgtgcttatggatggttccatcatacagtttcctaacacttacctggagggttctgttagagtagtaacaacttttgatgctgagtactgtagacatggtacatgcgaaaggtcagaagtaggtatttgcctatctaccagtggtagatgggttcttaataatgagcattacagagctctatcaggagttttctgtggtgttgatgcgatgaatctcatagctaacatctttactcctcttgtgcaacctgtgggtgctttagatgtgtctgcttcagtagtggctggtggtattattgccatattggtgacttgtgctgcctactactttatgaaattcagacgtgtttttggtgagtacaaccatgttgttgctgctaatgcacttttgtttttgatgtctttcactatactctgtctggtaccagcttacagctttctgccgggagtctactcagtcttttacttgtacttgacattctatttcaccaatgatgtttcattcttggctcaccttcaatggtttgccatgttttctcctattgtgcctttttggataacagcaatctatgtattctgtatttctctgaagcactgccattggttctttaacaactatcttaggaaaagagtcatgtttaatggagttacatttagtaccttcgaggaggctgctttgtgtacctttttgctcaacaaggaaatgtacctaaaattgcgtagcgagacactgttgccacttacacagtataacaggtatcttgctctatataacaagtacaagtatttcagtggagccttagatactaccagctatcgtgaagcagcttgctgccacttagcaaaggctctaaatgactttagcaactcaggtgctgatgttctctaccaaccaccacagacatcaatcacttctgctgttctgcagagtggttttaggaaaatggcattcccgtcaggcaaagttgaagggtgcatggtacaagtaacctgtggaactacaactcttaatggattgtggttggatgacacagtatactgtccaagacatgtcatttgcacagcagaagacatgcttaatcctaactatgaagatctgctcattcgcaaatccaaccatagctttcttgttcaggctggcaatgttcaacttcgtgttattggccattctatgcaaaattgtctgcttaggcttaaagttgatacttctaaccctaagacacccaagtataaatttgtccgtatccaacctggtcaaacattttcagttctagcatgctacaatggttcaccatctggtgtttatcagtgtgccatgagacctaatcataccattaaaggttctttccttaatggatcatgtggtagtgttggttttaacattgattatgattgcgtgtctttctgctatatgcatcatatggagcttccaacaggagtacacgctggtactgacttagaaggtaaattctatggtccatttgttgacagacaaactgcacaggctgcaggtacagacacaaccataacattaaatgttttggcatggctgtatgctgctgttatcaatggtgataggtggtttcttaatagattcaccactactttgaatgactttaaccttgtggcaatgaagtacaactatgaacctttgacacaagatcatgttgacatattgggacctctttctgctcaaacaggaattgccgtcttagatatgtgtgctgctttgaaagagctgctgcagaatggtatgaatggtcgtactatccttggtagcactattttagaagatgagtttacaccatttgatgttgttagacaatgctctggtgttaccttccaaggtaagttcaagaaaattgttaagggcactcatcattggatgcttttaactttcttgacatcactattgattcttgttcaaagtacacagtggtcactgtttttctttgtttacgagaatgctttcttgccatttactcttggtattatggcaattgctgcatgtgctatgctgcttgttaagcataagcacgcattcttgtgcttgtttctgttaccttctcttgcaacagttgcttactttaatatggtctacatgcctgctagctgggtgatgcgtatcatgacatggcttgaattggctgacactagcttgtctggttataggcttaaggattgtgttatgtatgcttcagctttagttttgcttattctcatgacagctcgcactgtttatgatgatgctgctagacgtgtttggacactgatgaatgtcattacacttgtttacaaagtctactatggtaatgctttagatcaagctatttccatgtgggccttagttatttctgtaacctctaactattctggtgtcgttacgactatcatgtttttagctagagctatagtgtttgtgtgtgttgagtattacccattgttatttattactggcaacaccttacagtgtatcatgcttgtttattgtttcttaggctattgttgctgctgctactttggccttttctgtttactcaaccgttacttcaggcttactcttggtgtttatgactacttggtctctacacaagaatttaggtatatgaactcccaggggcttttgcctcctaagagtagtattgatgctttcaagcttaacattaagttgttgggtattggaggtaaaccatgtatcaaggttgctactgtacagtctaaaatgtctgacgtaaagtgcacatctgtggtactgctctcggttcttcaacaacttagagtagagtcatcttctaaattgtgggcacaatgtgtacaactccacaatgatattcttcttgcaaaagacacaactgaagctttcgagaagatggtttctcttttgtctgttttgctatccatgcagggtgctgtagacattaataggttgtgcgaggaaatgctcgataaccgtgctactcttcaggctattgcttcagaatttagttctttaccatcatatgccgcttatgccactgcccaggaggcctatgagcaggctgtagctaatggtgattctgaagtcgttctcaaaaagttaaagaaatctttgaatgtggctaaatctgagtttgaccgtgatgctgccatgcaacgcaagttggaaaagatggcagatcaggctatgacccaaatgtacaaacaggcaagatctgaggacaagagggcaaaagtaactagtgctatgcaaacaatgctcttcactatgcttaggaagcttgataatgatgcacttaacaacattatcaacaatgcgcgtgatggttgtgttccactcaacatcataccattgactacagcagccaaactcatggttgttgtccctgattatggtacctacaagaacacttgtgatggtaacacctttacatatgcatctgcactctgggaaatccagcaagttgttgatgcggatagcaagattgttcaacttagtgaaattaacatggacaattcaccaaatttggcttggcctcttattgttacagctctaagagccaactcagctgttaaactacagaataatgaactgagtccagtagcactacgacagatgtcctgtgcggctggtaccacacaaacagcttgtactgatgacaatgcacttgcctactataacaattcgaagggaggtaggtttgtgctggcattactatcagaccaccaagatctcaaatgggctagattccctaagagtgatggtacaggtacaatttacacagaactggaaccaccttgtaggtttgttacagacacaccaaaagggcctaaagtgaaatacttgtacttcatcaaaggcttaaacaacctaaatagaggtatggtgctgggcagtttagctgctacagtacgtcttcaggctggaaatgctacagaagtacctgccaattcaactgtgctttccttctgtgcttttgcagtagaccctgctaaagcatataaggattacctagcaagtggaggacaaccaatcaccaactgtgtgaagatgttgtgtacacacactggtacaggacaggcaattactgtaacaccagaagctaacatggaccaagagtcctttggtggtgcttcatgttgtctgtattgtagatgccacattgaccatccaaatcctaaaggattctgtgacttgaaaggtaagtacgtccaaatacctaccacttgtgctaatgacccagtgggttttacacttagaaacacagtctgtaccgtctgcggaatgtggaaaggttatggctgtagttgtgaccaactccgcgaacccttgatgcagtctgcggatgcatcaacgtttttaaacgggtttgcggtgtaagtgcagcccgtcttacaccgtgcggcacaggcactagtactgatgtcgtctacagggcttttgatatttacaacgaaaaagttgctggttttgcaaagttcctaaaaactaattgctgtcgcttccaggagaaggatgaggaaggcaatttattagactcttactttgtagttaagaggcatactatgtctaactaccaacatgaagagactatttataacttggttaaagattgtccagcggttgctgtccatgactttttcaagtttagagtagatggtgacatggtaccacatatatcacgtcagcgtctaactaaatacacaatggctgatttagtctatgctctacgtcattttgatgagggtaattgtgatacattaaaagaaatactcgtcacatacaattgctgtgatgatgattatttcaataagaaggattggtatgacttcgtagagaatcctgacatcttacgcgtatatgctaacttaggtgagcgtgtacgccaatcattattaaagactgtacaattctgcgatgctatgcgtgatgcaggcattgtaggcgtactgacattagataatcaggatcttaatgggaactggtacgatttcggtgatttcgtacaagtagcaccaggctgcggagttcctattgtggattcatattactcattgctgatgcccatcctcactttgactagggcattggctgctgagtcccatatggatgctgatctcgcaaaaccacttattaagtgggatttgctgaaatatgattttacggaagagagactttgtctcttcgaccgttattttaaatattgggaccagacataccatcccaattgtattaactgtttggatgataggtgtatccttcattgtgcaaactttaatgtgttattttctactgtgtttccacctacaagttttggaccactagtaagaaaaatatttgtagatggtgttccttttgttgtttcaactggataccattttcgtgagttaggagtcgtacataatcaggatgtaaacttacatagctcgcgtctcagtttcaaggaacttttagtgtatgctgctgatccagctatgcatgcagcttctggcaatttattgctagataaacgcactacatgcttttcagtagctgcactaacaaacaatgttgcttttcaaactgtcaaacccggtaattttaataaagacttttatgactttgctgtgtctaaaggtttctttaaggaaggaagttctgttgaactaaaacacttcttctttgctcaggatggcaacgctgctatcagtgattatgactattatcgttataatctgccaacaatgtgtgatatcagacaactcctattcgtagttgaagttgttgataaatactttgattgttacgatggtggctgtattaatgccaaccaagtaatcgttaacaatctggataaatcagctggtttcccatttaataaatggggtaaggctagactttattatgactcaatgagttatgaggatcaagatgcacttttcgcgtatactaagcgtaatgtcatccctactataactcaaatgaatcttaagtatgccattagtgcaaagaatagagctcgcaccgtagctggtgtctctatctgtagtactatgacaaatagacagtttcatcagaaattattgaagtcaatagccgccactagaggagctactgtggtaattggaacaagcaagttttacggtggctggcataatatgttaaaaactgtttacagtgatgtagaaactccacaccttatgggttgggattatccaaaatgtgacagagccatgcctaacatgcttaggataatggcctctcttgttcttgctcgcaaacataacacttgctgtaacttatcacaccgtttctacaggttagctaacgagtgtgcgcaagtattaagtgagatggtcatgtgtggcggctcactatatgttaaaccaggtggaacatcatccggtgatgctacaactgcttatgctaatagtgtctttaacatttgtcaagctgttacagccaatgtaaatgcacttctttcaactgatggtaataagatagctgacaagtatgtccgcaatctacaacacaggctctatgagtgtctctatagaaatagggatgttgatcatgaattcgtggatgagttttacgcttacctgcgtaaacatttctccatgatgattctttctgatgatgccgttgtgtgctataacagtaactatgcggctcaaggtttagtagctagcattaagaactttaaggcagttctttattatcaaaataatgtgttcatgtctgaggcaaaatgttggactgagactgaccttactaaaggacctcacgaattttgctcacagcatacaatgctagttaaacaaggagatgattacgtgtacctgccttacccagatccatcaagaatattaggcgcaggctgttttgtcgatgatattgtcaaaacagatggtacacttatgattgaaaggttcgtgtcactggctattgatgcttacccacttacaaaacatcctaatcaggagtatgctgatgtctttcacttgtatttacaatacattagaaagttacatgatgagcttactggccacatgttggacatgtattccgtaatgctaactaatgataacacctcacggtactgggaacctgagttttatgaggctatgtacacaccacatacagtcttgcaggctgtaggtgcttgtgtattgtgcaattcacagacttcacttcgttgcggtgcctgtattaggagaccattcctatgttgcaagtgctgctatgaccatgtcatttcaacatcacacaaattagtgttgtctgttaatccctatgtttgcaatgccccaggttgtgatgtcactgatgtgacacaactgtatctaggaggtatgagctattattgcaagtcacataagcctcccattagttttccattatgtgctaatggtcaggtttttggtttatacaaaaacacatgtgtaggcagtgacaatgtcactgacttcaatgcgatagcaacatgtgattggactaatgctggcgattacatacttgccaacacttgtactgagagactcaagcttttcgcagcagaaacgctcaaagccactgaggaaacatttaagctgtcatatggtattgccactgtacgcgaagtactctctgacagagaattgcatctttcatgggaggttggaaaacctagaccaccattgaacagaaactatgtctttactggttaccgtgtaactaaaaatagtaaagtacagattggagagtacacctttgaaaaaggtgactatggtgatgctgttgtgtacagaggtactacgacatacaagttgaatgttggtgattactttgtgttgacatctcacactgtaatgccacttagtgcacctactctagtgccacaagagcactatgtgagaattactggcttgtacccaacactcaacatctcagatgagttttctagcaatgttgcaaattatcaaaaggtcggcatgcaaaagtactctacactccaaggaccacctggtactggtaagagtcattttgccatcggacttgctctctattacccatctgctcgcatagtgtatacggcatgctctcatgcagctgttgatgccctatgtgaaaaggcattaaaatatttgcccatagataaatgtagtagaatcatacctgcgcgtgcgcgcgtagagtgttttgataaattcaaagtgaattcaacactagaacagtatgttttctgcactgtaaatgcattgccagaaacaactgctgacattgtagtctttgatgaaatctctatggctactaattatgacttgagtgttgtcaatgctagacttcgtgcaaaacactacgtctatattggcgatcctgctcaattaccagccccccgcacattgctgactaaaggcacactagaaccagaatattttaattcagtgtgcagacttatgaaaacaataggtccagacatgttccttggaacttgtcgccgttgtcctgctgaaattgttgacactgtgagtgctttagtttatgacaataagctaaaagcacacaaggataagtcagctcaatgcttcaaaatgttctacaaaggtgttattacacatgatgtttcatctgcaatcaacagacctcaaataggcgttgtaagagaatttcttacacgcaatcctgcttggagaaaagctgtttttatctcaccttataattcacagaacgctgtagcttcaaaaatcttaggattgcctacgcagactgttgattcatcacagggttctgaatatgactatgtcatattcacacaaactactgaaacagcacactcttgtaatgtcaaccgcttcaatgtggctatcacaagggcaaaaattggcattttgtgcataatgtctgatagagatctttatgacaaactgcaatttacaagtctagaaataccacgtcgcaatgtggctacattacaagcagaaaatgtaactggactttttaaggactgtagtaagatcattactggtcttcatcctacacaggcacctacacacctcagcgttgatataaagttcaagactgaaggattatgtgttgacataccaggcataccaaaggacatgacctaccgtagactcatctctatgatgggtttcaaaatgaattaccaagtcaatggttaccctaatatgtttatcacccgcgaagaagctattcgtcacgttcgtgcgtggattggctttgatgtagagggctgtcatgcaactagagatgctgtgggtactaacctacctctccagctaggattttctacaggtgttaacttagtagctgtaccgactggttatgttgacactgaaaataacacagaattcaccagagttaatgcaaaacctccaccaggtgaccagtttaaacatcttataccactcatgtataaaggcttgccctggaatgtagtgcgtattaagatagtacaaatgctcagtgatacactgaaaggattgtcagacagagtcgtgttcgtcctttgggcgcatggctttgagcttacatcaatgaagtactttgtcaagattggacctgaaagaacgtgttgtctgtgtgacaaacgtgcaacttgcttttctacttcatcagatacttatgcctgctggaatcattctgtgggttttgactatgtctataacccatttatgattgatgttcagcagtggggctttacgggtaaccttcagagtaaccatgaccaacattgccaggtacatggaaatgcacatgtggctagttgtgatgctatcatgactagatgtttagcagtccatgagtgctttgttaagcgcgttgattggtctgttgaataccctattataggagatgaactgagggttaattctgcttgcagaaaagtacaacacatggttgtgaagtctgcattgcttgctgataagtttccagttcttcatgacattggaaatccaaaggctatcaagtgtgtgcctcaggctgaagtagaatggaagttctacgatgctcagccatgtagtgacaaagcttacaaaatagaggaactcttctattcttatgctacacatcacgataaattcactgatggtgtttgtttgttttggaattgtaacgttgatcgttacccagccaatgcaattgtgtgtaggtttgacacaagagtcttgtcaaacttgaacttaccaggctgtgatggtggtagtttgtatgtgaataagcatgcattccacactccagctttcgataaaagtgcatttactaatttaaagcaattgcctttcttttactattctgatagtccttgtgagtctcatggcaaacaagtagtgtcggatattgattatgttccactcaaatctgctacgtgtattacacgatgcaatttaggtggtgctgtttgcagacaccatgcaaatgagtaccgacagtacttggatgcatataatatgatgatttctgctggatttagcctatggatttacaaacaatttgatacttataacctgtggaatacatttaccaggttacagagtttagaaaatgtggcttataatgttgttaataaaggacactttgatggacacgccggcgaagcacctgtttccatcattaataatgctgtttacacaaaggtagatggtattgatgtggagatctttgaaaataagacaacacttcctgttaatgttgcatttgagctttgggctaagcgtaacattaaaccagtgccagagattaagatactcaataatttgggtgttgatatcgctgctaatactgtaatctgggactacaaaagagaagccccagcacatgtatctacaataggtgtctgcacaatgactgacattgccaagaaacctactgagagtgcttgttcttcacttactgtcttgtttgatggtagagtggaaggacaggtagacctttttagaaacgcccgtaatggtgttttaataacagaaggttcagtcaaaggtctaacaccttcaaagggaccagcacaagctagcgtcaatggagtcacattaattggagaatcagtaaaaacacagtttaactactttaagaaagtagacggcattattcaacagttgcctgaaacctactttactcagagcagagacttagaggattttaagcccagatcacaaatggaaactgactttctcgagctcgctatggatgaattcatacagcgatataagctcgagggctatgccttcgaacacatcgtttatggagatttcagtcatggacaacttggcggtcttcatttaatgataggcttagccaagcgctcacaagattcaccacttaaattagaggattttatccctatggacagcacagtgaaaaattacttcataacagatgcgcaaacaggttcatcaaaatgtgtgtgttctgtgattgatcttttacttgatgactttgtcgagataataaagtcacaagatttgtcagtgatttcaaaagtggtcaaggttacaattgactatgctgaaatttcattcatgctttggtgtaaggatggacatgttgaaaccttctacccaaaactacaagcaagtcaagcgtggcaaccaggtgttgcgatgcctaacttgtacaagatgcaaagaatgcttcttgaaaagtgtgaccttcagaattatggtgaaaatgctgttataccaaaaggaataatgatgaatgtcgcaaagtatactcaactgtgtcaatacttaaatacacttactttagctgtaccctacaacatgagagttattcactttggtgctggctctgataaaggagttgcaccaggtacagctgtgctcagacaatggttgccaactggcacactacttgtcgattcagatcttaatgacttcgtctccgacgcagattctactttaattggagactgtgcaacagtacatacggctaataaatgggaccttattattagcgatatgtatgaccctaggaccaaacatgtgacaaaagagaatgactctaaagaagggtttttcacttatctgtgtggatttataaagcaaaaactagccctgggtggttctatagctgtaaagataacagagcattcttggaatgctgacctttacaagcttatgggccatttctcatggtggacagcttttgttacaaatgtaaatgcatcatcatcggaagcatttttaattggggctaactatcttggcaagccgaaggaacaaattgatggctataccatgcatgctaactacattttctggaggaacacaaatcctatccagttgtcttcctattcactctttgacatgagcaaatttcctcttaaattaagaggaactgctgtaatgtctcttaaggagaatcaaatcaatgatatgatttattctcttctggaaaaaggtaggcttatcattagagaaaacaacagagttgtggtttcaagtgatattcttgttaacaactaaacgaacatgtttattttcttattatttcttactctcactagtggtagtgaccttgaccggtgcaccacttttgatgatgttcaagctcctaattacactcaacatacttcatctatgaggggggtttactatcctgatgaaatttttagatcagacactctttatttaactcaggatttatttcttccattttattctaatgttacagggtttcatactattaatcatacgtttggcaaccctgtcataccttttaaggatggtatttattttgctgccacagagaaatcaaatgttgtccgtggttgggtttttggttctaccatgaacaacaagtcacagtcggtgattattattaacaattctactaatgttgttatacgagcatgtaactttgaattgtgtgacaaccctttctttgctgtttctaaacccatgggtacacagacacatactatgatattcgataatgcatttaattgcactttcgagtacatatctgatgccttttcgcttgatgtttcagaaaagtcaggtaattttaaacacttacgagagtttgtgtttaaaaataaagatgggtttctctatgtttataagggctatcaacctatagatgtagttcgtgatctaccttctggttttaacactttgaaacctatttttaagttgcctcttggtattaacattacaaattttagagccattcttacagccttttcacctgctcaagacatttggggcacgtcagctgcagcctattttgttggctatttaaagccaactacatttatgctcaagtatgatgaaaatggtacaatcacagatgctgttgattgttctcaaaatccacttgctgaactcaaatgctctgttaagagctttgagattgacaaaggaatttaccagacctctaatttcagggttgttccctcaggagatgttgtgagattccctaatattacaaacttgtgtccttttggagaggtttttaatgctactaaattcccttctgtctatgcatgggagagaaaaaaaatttctaattgtgttgctgattactctgtgctctacaactcaacatttttttcaacctttaagtgctatggcgtttctgccactaagttgaatgatctttgcttctccaatgtctatgcagattcttttgtagtcaagggagatgatgtaagacaaatagcgccaggacaaactggtgttattgctgattataattataaattgccagatgatttcatgggttgtgtccttgcttggaatactaggaacattgatgctacttcaactggtaattataattataaatataggtatcttagacatggcaagcttaggccctttgagagagacatatctaatgtgcctttctcccctgatggcaaaccttgcaccccacctgctcttaattgttattggccattaaatgattatggtttttacaccactactggcattggctaccaaccttacagagttgtagtactttcttttgaacttttaaatgcaccggccacggtttgtggaccaaaattatccactgaccttattaagaaccagtgtgtcaattttaattttaatggactcactggtactggtgtgttaactccttcttcaaagagatttcaaccatttcaacaatttggccgtgatgtttctgatttcactgattccgttcgagatcctaaaacatctgaaatattagacatttcaccttgcgcttttgggggtgtaagtgtaattacacctggaacaaatgcttcatctgaagttgctgttctatatcaagatgttaactgcactgatgtttctacagcaattcatgcagatcaactcacaccagcttggcgcatatattctactggaaacaatgtattccagactcaagcaggctgtcttataggagctgagcatgtcgacacttcttatgagtgcgacattcctattggagctggcatttgtgctagttaccatacagtttctttattacgtagtactagccaaaaatctattgtggcttatactatgtctttaggtgctgatagttcaattgcttactctaataacaccattgctatacctactaacttttcaattagcattactacagaagtaatgcctgtttctatggctaaaacctccgtagattgtaatatgtacatctgcggagattctactgaatgtgctaatttgcttctccaatatggtagcttttgcacacaactaaatcgtgcactctcaggtattgctgctgaacaggatcgcaacacacgtgaagtgttcgctcaagtcaaacaaatgtacaaaaccccaactttgaaatattttggtggttttaatttttcacaaatattacctgaccctctaaagccaactaagaggtcttttattgaggacttgctctttaataaggtgacactcgctgatgctggcttcatgaagcaatatggcgaatgcctaggtgatattaatgctagagatctcatttgtgcgcagaagttcaatggacttacagtgttgccacctctgctcactgatgatatgattgctgcctacactgctgctctagttagtggtactgccactgctggatggacatttggtgctggcgctgctcttcaaataccttttgctatgcaaatggcatataggttcaatggcattggagttacccaaaatgttctctatgagaaccaaaaacaaatcgccaaccaatttaacaaggcgattagtcaaattcaagaatcacttacaacaacatcaactgcattgggcaagctgcaagacgttgttaaccagaatgctcaagcattaaacacacttgttaaacaacttagctctaattttggtgcaatttcaagtgtgctaaatgatatcctttcgcgacttgataaagtcgaggcggaggtacaaattgacaggttaattacaggcagacttcaaagccttcaaacctatgtaacacaacaactaatcagggctgctgaaatcagggcttctgctaatcttgctgctactaaaatgtctgagtgtgttcttggacaatcaaaaagagttgacttttgtggaaagggctaccaccttatgtccttcccacaagcagccccgcatggtgttgtcttcctacatgtcacgtatgtgccatcccaggagaggaacttcaccacagcgccagcaatttgtcatgaaggcaaagcatacttccctcgtgaaggtgtttttgtgtttaatggcacttcttggtttattacacagaggaacttcttttctccacaaataattactacagacaatacatttgtctcaggaaattgtgatgtcgttattggcatcattaacaacacagtttatgatcctctgcaacctgagcttgactcattcaaagaagagctggacaagtacttcaaaaatcatacatcaccagatgttgatcttggcgacatttcaggcattaacgcttctgtcgtcaacattcaaaaagaaattgaccgcctcaatgaggtcgctaaaaatttaaatgaatcactcattgaccttcaagaattgggaaaatatgagcaatatattaaatggccttggtatgtttggctcggcttcattgctggactaattgccatcgtcatggttacaatcttgctttgttgcatgactagttgttgcagttgcctcaagggtgcatgctcttgtggttcttgctgcaagtttgatgaggatgactctgagccagttctcaagggtgtcaaattacattacacataaacgaacttatggatttgtttatgagattttttactcttagatcaattactgcacagccagtaaaaattgacaatgcttctcctgcaagtactgttcatgctacagcaacgataccgctacaagcctcactccctttcggatggcttgttattggcgttgcatttcttgctgtttttcagagcgctaccaaaataattgcgctcaataaaagatggcagctagccctttataagggcttccagttcatttgcaatttactgctgctatttgttaccatctattcacatcttttgcttgtcgctgcaggtatggaggcgcaatttttgtacctctatgccttgatatattttctacaatgcatcaacgcatgtagaattattatgagatgttggctttgttggaagtgcaaatccaagaacccattactttatgatgccaactactttgtttgctggcacacacataactatgactactgtataccatataacagtgtcacagatacaattgtcgttactgaaggtgacggcatttcaacaccaaaactcaaagaagactaccaaattggtggttattctgaggataggcactcaggtgttaaagactatgtcgttgtacatggctatttcaccgaagtttactaccagcttgagtctacacaaattactacagacactggtattgaaaatgctacattcttcatctttaacaagcttgttaaagacccaccgaatgtgcaaatacacacaatcgacggctcttcaggagttgctaatccagcaatggatccaatttatgatgagccgacgacgactactagcgtgcctttgtaagcacaagaaagtgagtacgaacttatgtactcattcgtttcggaagaaacaggtacgttaatagttaatagcgtacttctttttcttgctttcgtggtattcttgctagtcacactagccatccttactgcgcttcgattgtgtgcgtactgctgcaatattgttaacgtgagtttagtaaaaccaacggtttacgtctactcgcgtgttaaaaatctgaactcttctgaaggagttcctgatcttctggtctaaacgaactaactattattattattctgtttggaactttaacattgcttatcatggcagacaacggtactattaccgttgaggagcttaaacaactcctggaacaatggaacctagtaataggtttcctattcctagcctggattatgttactacaatttgcctattctaatcggaacaggtttttgtacataataaagcttgttttcctctggctcttgtggccagtaacacttgcttgttttgtgcttgctgctgtctacagaattaattgggtgactggcgggattgcgattgcaatggcttgtattgtaggcttgatgtggcttagctacttcgttgcttccttcaggctgtttgctcgtacccgctcaatgtggtcattcaacccagaaacaaacattcttctcaatgtgcctctccgggggacaattgtgaccagaccgctcatggaaagtgaacttgtcattggtgctgtgatcattcgtggtcacttgcgaatggccggacactccctagggcgctgtgacattaaggacctgccaaaagagatcactgtggctacatcacgaacgctttcttattacaaattaggagcgtcgcagcgtgtaggcactgattcaggttttgctgcatacaaccgctaccgtattggaaactataaattaaatacagaccacgccggtagcaacgacaatattgctttgctagtacagtaagtgacaacagatgtttcatcttgttgacttccaggttacaatagcagagatattgattatcattatgaggactttcaggattgctatttggaatcttgacgttataataagttcaatagtgagacaattatttaagcctctaactaagaagaattattcggagttagatgatgaagaacctatggagttagattatccataaaacgaacatgaaaattattctcttcctgacattgattgtatttacatcttgcgagctatatcactatcaggagtgtgttagaggtacgactgtactactaaaagaaccttgcccatcaggaacatacgagggcaattcaccatttcaccctcttgctgacaataaatttgcactaacttgcactagcacacactttgcttttgcttgtgctgacggtactcgacatacctatcagctgcgtgcaagatcagtttcaccaaaacttttcatcagacaagaggaggttcaacaagagctctactcgccactttttctcattgttgctgctctagtatttttaatactttgcttcaccattaagagaaagacagaatgaatgagctcactttaattgacttctatttgtgctttttagcctttctgctattccttgttttaataatgcttattatattttggttttcactcgaaatccaggatctagaagaaccttgtaccaaagtctaaacgaacatgaaacttctcattgttttgacttgtatttctctatgcagttgcatatgcactgtagtacagcgctgtgcatctaataaacctcatgtgcttgaagatccttgtaaggtacaacactaggggtaatacttatagcactgcttggctttgtgctctaggaaaggttttaccttttcatagatggcacactatggttcaaacatgcacacctaatgttactatcaactgtcaagatccagctggtggtgcgcttatagctaggtgttggtaccttcatgaaggtcaccaaactgctgcatttagagacgtacttgttgttttaaataaacgaacaaattaaaatgtctgataatggaccccaatcaaaccaacgtagtgccccccgcattacatttggtggacccacagattcaactgacaataaccagaatggaggacgcaatggggcaaggccaaaacagcgccgaccccaaggtttacccaataatactgcgtcttggttcacagctctcactcagcatggcaaggaggaacttagattccctcgaggccagggcgttccaatcaacaccaatagtggtccagatgaccaaattggctactaccgaagagctacccgacgagttcgtggtggtgacggcaaaatgaaagagctcagccccagatggtacttctattacctaggaactggcccagaagcttcacttccctacggcgctaacaaagaaggcatcgtatgggttgcaactgagggagccttgaatacacccaaagaccacattggcacccgcaatcctaataacaatgctgccaccgtgctacaacttcctcaaggaacaacattgccaaaaggcttctacgcagagggaagcagaggcggcagtcaagcctcttctcgctcctcatcacgtagtcgcggtaattcaagaaattcaactcctggcagcagtaggggaaattctcctgctcgaatggctagcggaggtggtgaaactgccctcgcgctattgctgctagacagattgaaccagcttgagagcaaagtttctggtaaaggccaacaacaacaaggccaaactgtcactaagaaatctgctgctgaggcatctaaaaagcctcgccaaaaacgtactgccacaaaacagtacaacgtcactcaagcatttgggagacgtggtccagaacaaacccaaggaaatttcggggaccaagacctaatcagacaaggaactgattacaaacattggccgcaaattgcacaatttgctccaagtgcctctgcattctttggaatgtcacgcattggcatggaagtcacaccttcgggaacatggctgacttatcatggagccattaaattggatgacaaagatccacaattcaaagacaacgtcatactgctgaacaagcacattgacgcatacaaaacattcccaccaacagagcctaaaaaggacaaaaagaaaaagactgatgaagctcagcctttgccgcagagacaaaagaagcagcccactgtgactcttcttcctgcggctgacatggatgatttctccagacaacttcaaaattccatgagtggagcttctgctgattcaactcaggcataaacactcatgatgaccacacaaggcagatgggctatgtaaacgttttcgcaattccgtttacgatacatagtctactcttgtgcagaatgaattctcgtaactaaacagcacaagtaggtttagttaactttaatctcacatagcaatctttaatcaatgtgtaacattagggaggacttgaaagagccaccacattttcatcgaggccacgcggagtacgatcgagggtacagtgaataatgctagggagagctgcctatatggaagagccctaatgtgtaaaattaattttagtagtgctatccccatgtgattttaatagcttcttaggagaatgacaaaaaaaaaaaaaaaaaaaaaaaa

SEQ ID NO: 12 - DNA, 29751 bp, SARS coronavirus; identical to SEQ ID NO: 11

SEQ ID NO: 13 - DNA, 29644 bp, SARS coronavirus
cgatctcttgtagatctgttctctaaacgaactttaaaatctgtgtagctgtcgctcggctgcatgcctagtgcacctacgcagtataaacaataataaattttactgtcgttgacaagaaacgagtaactcgtccctcttctgcagactgcttacggtttcgtccgtgttgcagtcgatcatcagcatacctaggtttcgtccgggtgtgaccgaaaggtaagatggagagccttgttcttggtgtcaacgagaaaacacacgtccaactcagtttgcctgtccttcaggttagagacgtgctagtgcgtggcttcggggactctgtggaagaggccctatcggaggcacgtgaacacctcaaaaatggcacttgtggtctagtagagctggaaaaaggcgtactgccccagcttgaacagccctatgtgttcattaaacgttctgatgccttaagcaccaatcacggccacaaggtcgttgagctggttgcagaaatggacggcattcagtacggtcgtagcggtataacactgggagtactcgtgccacatgtgggcgaaaccccaattgcataccgcaatgttcttcttcgtaagaacggtaataagggagccggtggtcatagctatggcatcgatctaaagtcttatgacttaggtgacgagcttggcactgatcccattgaagattatgaacaaaactggaacactaagcatggcagtggtgcactccgtgaactcactcgtgagctcaatggaggtgcagtcactcgctatgtcgacaacaatttctgtggcccagatgggtaccctcttgattgcatcaaagattttctcgcacgcgcgggcaagtcaatgtgcactctttccgaacaacttgattacatcgagtcgaagagaggtgtctactgctgccgtgaccatgagcatgaaattgcctggttcactgagcgctctgataagagctacgagcaccagacacccttcgaaattaagagtgccaagaaatttgacactttcaaaggggaatgcccaaagtttgtgtttcctcttaactcaaaagtcaaagtcattcaaccacgtgttgaaaagaaaaagactgagggtttcatggggcgtatacgctctgtgtaccctgttgcatctccacaggagtgtaacaatatgcacttgtctaccttgatgaaatgtaatcattgcgatgaagtttcatggcagacgtgcgactttctgaaagccacttgtgaacattgtggcactgaaaatttagttattgaaggacctactacatgtgggtacctacctactaatgctgtagtgaaaatgccatgtcctgcctgtcaagacccagagattggacctgagcatagtgttgcagattatcacaaccactcaaacattgaaactcgactccgcaagggaggtaggactagatgttttggaggctgtgtgtttgcctatgttggctgctataataagcgtgcctactgggttcctcgtgctagtgctgatattggctcaggccatactggcattactggtgacaatgtggagaccttgaatgaggatctccttgagatactgagtcgtgaacgtgttaacattaacattgttggcgattttcatttgaatgaagaggttgccatcattttggcatctttctctgcttctacaagtgcctttattgacactataaagagtcttgattacaagtctttcaaaaccattgttgagtcctgcggtaactataaagttaccaagggaaagcccgtaaaaggtgcttggaacattggacaacagagatcagttttaacaccactgtgtggttttccctcacaggctgctggtgttatcagatcaatttttgcgcgcacacttgatgcagcaaaccactcaattcctgatttgcaaagagcagctgtcaccatacttgatggtatttctgaacagtcattacgtcttgtcgacgccatggtttatacttcagacctgctcaccaacagtgtcattattatggcatatgtaactggtggtcttgtacaacagacttctcagtggttgtctaatcttttgggcactactgttgaaaaactcaggcctatctttgaatggattgaggcgaaacttagtgcaggagttgaatttctcaaggatgcttgggagattctcaaatttctcattacaggtgtttttgacatcgtcaagggtcaaatacaggttgcttcagataacatcaaggattgtgtaaaatgcttcattgatgttgttaacaaggcactcgaaatgtgcattgatcaagtcactatcgctggcgcaaagttgcgatcactcaacttaggtgaagtcttcatcgctcaaagcaagggactttaccgtcagtgtatacgtggcaaggagcagctgcaactactcatgcctcttaaggcaccaaaagaagtaacctttcttgaaggtgattcacatgacacagtacttacctctgaggaggttgttctcaagaacggtgaactcgaagcactcgagacgcccgttgatagcttcacaaatggagctatcgttggcacaccagtctgtgtaaatggcctcatgctcttagagattaaggacaaagaacaatactgcgcattgtctcctggtttactggctacaaacaatgtctttcgcttaaaagggggtgcaccaattaaaggtgtaacctttggagaagatactgtttgggaagttcaaggttacaagaatgtgagaatcacatttgagcttgatgaacgtgttgacaaagtgcttaatgaaaagtgctctgtctacactgttgaatccggtaccgaagttactgagtttgcatgtgttgtagcagaggctgttgtgaagactttacaaccagtttctgatctccttaccaacatgggtattgatcttgatgagtggagtgtagctacattctacttatttgatgatgctggtgaagaaaacttttcatcacgtatgtattgttccttttaccctccagatgaggaagaagaggacgatgcagagtgtgaggaagaagaaattgatgaaacctgtgaacatgagtacggtacagaggatgattatcaaggtctccctctggaatttggtgcctcagctgaaacagttcgagttgaggaagaagaagaggaagactggctggatgatactactgagcaatcagagattgagccagaaccagaacctacacctgaagaaccagttaatcagtttactggttatttaaaacttactgacaatgttgccattaaatgtgttgacatcgttaaggaggcacaaagtgctaatcctatggtgattgtaaatgctgctaacatacacctgaaacatggtggtggtgtagcaggtgcactcaacaaggcaaccaatggtgccatgcaaaaggagagtgatgattacattaagctaaatggccctcttacagtaggagggtcttgtttgctttctggacataatcttgctaagaagtgtctgcatgttgttggacctaacctaaatgcaggtgaggacatccagcttcttaaggcagcatatgaaaatttcaattcacaggacatcttacttgcaccattgttgtcagcaggcatatttggtgctaaaccacttcagtctttacaagtgtgcgtgcagacggttcgtacacaggtttatattgcagtcaatgacaaagctctttatgagcaggttgtcatggattatcttgataacctgaagcctagagtggaagcacctaaacaagaggagccaccaaacacagaagattccaaaactgaggagaaatctgtcgtacagaagcctgtcgatgtgaagccaaaaattaaggcctgcattgatgaggttaccacaacactggaagaaactaagtttcttaccaataagttactcttgtttgctgatatcaatggtaagctttaccatgattctcagaacatgcttagaggtgaagatatgtctttccttgagaaggatgcaccttacatggtaggtgatgttatcactagtggtgatatcacttgtgttgtaataccctccaaaaaggctggtggcactactgagatgctctcaagagctttgaagaaagtgccagttgatgagtatataaccacgtaccctggacaaggatgtgctggttatacacttgaggaagctaagactgctcttaagaaatgcaaatctgcattttatgtactaccttcagaagcacctaatgctaaggaagagattctaggaactgtatcctggaatttgagagaaatgcttgctcatgctgaagagacaagaaaattaatgcctatatgcatggatgttagagccataatggcaaccatccaacgtaagtataaaggaattaaaattcaagagggcatcgttgactatggtgtccgattcttcttttatactagtaaagagcctgtagcttctattattacgaagctgaactctctaaatgagccgcttgtcacaatgccaattggttatgtgacacatggttttaatcttgaagaggctgcgcgctgtatgcgttctcttaaagctcctgccgtagtgtcagtatcatcaccagatgctgttactacatataatggatacctcacttcgtcatcaaagacatctgaggagcactttgtagaaacagtttctttggctggctcttacagagattggtcctattcaggacagcgtacagagttaggtgttgaatttcttaagcgtggtgacaaaattgtgtaccacactctggagagccccgtcgagtttcatcttgacggtgaggttctttcacttgacaaactaaagagtctcttatccctgcgggaggttaagactataaaagtgttcacaactgtggacaacactaatctccacacacagcttgtggatatgtctatgacatatggacagcagtttggtccaacatacttggatggtgctgatgttacaaaaattaaacctcatgtaaatcatgagggtaagactttctttgtactacctagtgatgacacactacgtagtgaagctttcgagtactaccatactcttgatgagagttttcttggtaggtacatgtctgctttaaaccacacaaagaaatggaaatttcctcaagttggtggtttaacttcaattaaatgggctgataacaattgttatttgtctagtgttttattagcacttcaacagcttgaagtcaaattcaatgcaccagcacttcaagaggcttattatagagcccgtgctggtgatgctgctaacttttgtgcactcatactcgcttacagtaataaaactgttggcgagcttggtgatgtcagagaaactatgacccatcttctacagcatgctaatttggaatctgcaaagcgagttcttaatgtggtgtgtaaacattgtggtcagaaaactactaccttaacgggtgtagaagctgtgatgtatatgggtactctatcttatgataatcttaagacaggtgtttccattccatgtgtgtgtggtcgtgatgctacacaatatctagtacaacaagagtcttcttttgttatgatgtctgcaccacctgctgagtataaattacagcaaggtacattcttatgtgcgaatgagtacactggtaactatcagtgtggtcattacactcatataactgctaaggagaccctctatcgtattgacggagctcaccttacaaagatgtcagagtacaaaggaccagtgactgatgttttctacaaggaaacatcttacactacaaccatcaagcctgtgtcgtataaactcgatggagttacttacacagagattgaaccaaaattggatgggtattataaaaaggataatgcttactatacagagcagcctatagaccttgtaccaactcaaccattaccaaatgcgagttttgataatttcaaactcacatgttctaacacaaaatttgctgatgatttaaatcaaatgacaggcttcacaaagccagcttcacgagagctatctgtcacattcttcccagacttgaatggcgatgtagtggctattgactatagacactattcagcgagtttcaagaaaggtgctaaattactgcataagccaattgtttggcacattaaccaggctacaaccaagacaacgttcaaaccaaacacttggtgtttacgttgtctttggagtacaaagccagtagatacttcaaattcatttgaagttctggcagtagaagacacacaaggaatggacaatcttgcttgtgaaagtcaacaacccacctctgaagaagtagtggaaaatcctaccatacagaaggaagtcatagagtgtgacgtgaaaactaccgaagttgtaggcaatgtcatacttaaaccatcagatgaaggtgttaaagtaacacaagagttaggtcatgaggatcttatggctgcttatgtggaaaacacaagcattaccattaagaaacctaatgagctttcactagccttaggtttaaaaacaattgccactcatggtattgctgcaattaatagtgttccttggagtaaaattttggcttatgtcaaaccattcttaggacaagcagcaattacaacatcaaattgcgctaagagattagcacaacgtgtgtttaacaattatatgccttatgtgtttacattattgttccaattgtgtacttttactaaaagtaccaattctagaattagagcttcactacctacaactattgctaaaaatagtgttaagagtgttgctaaattatgtttggatgccggcattaattatgtgaagtcacccaaattttctaaattgttcacaatcgctatgtggctattgttgttaagtatttgcttaggttctctaatctgtgtaactgctgcttttggtgtactcttatctaattttggtgctccttcttattgtaatggcgttagagaattgtatcttaattcgtctaacgttactactatggatttctgtgaaggttcttttccttgcagcatttgtttaagtggattagactcccttgattcttatccagctcttgaaaccattcaggtgacgatttcatcgtacaagctagacttgacaattttaggtctggccgctgagtgggttttggcatatatgttgttcacaaaattcttttatttattaggtctttcagctataatgcaggtgttctttggctattttgctagtcatttcatcagcaattcttggctcatgtggtttatcattagtattgtacaaatggcacccgtttctgcaatggttaggatgtacatcttctttgcttctttctactacatatggaagagctatgttcatatcatggatggttgcacctcttcgacttgcatgatgtgctataagcgcaatcgtgccacacgcgttgagtgtacaactattgttaatggcatgaagagatctttctatgtctatgcaaatggaggccgtggcttctgcaagactcacaattggaattgtctcaattgtgacacattttgcactggtagtacattcattagtgatgaagttgctcgtgatttgtcactccagtttaaaagaccaatcaaccctactgaccagtcatcgtatattgttgatagtgttgctgtgaaaaatggcgcgcttcacctctactttgacaaggctggtcaaaagacctatgagagacatccgctctcccattttgtcaatttagacaatttgagagctaacaacactaaaggttcactgcctattaatgtcatagtttttgatggcaagtccaaatgcgacgagtctgcttctaagtctgcttctgtgtactacagtcagctgatgtgccaacctattctgttgcttgaccaagctcttgtatcagacgttggagatagtactgaagtttccgttaagatgtttgatgcttatgtcgacaccttttcagcaacttttagtgttcctatggaaaaacttaaggcacttgttgctacagctcacagcgagttagcaaagggtgtagctttagatggtgtcctttctacattcgtgtcagctgcccgacaaggtgttgttgataccgatgttgacacaaaggatgttattgaatgtctcaaactttcacatcactctgacttagaagtgacaggtgacagttgtaacaatttcatgctcacctataataaggttgaaaacatgacgcccagagatcttggcgcatgtattgactgtaatgcaaggcatatcaatgcccaagtagcaaaaagtcacaatgtttcactcatctggaatgtaaaagactacatgtctttatctgaacagctgcgtaaacaaattcgtagtgctgccaagaagaacaacataccttttagactaacttgtgctacaactagacaggttgtcaatgtcataactactaaaatctcactcaagggtggtaagattgttagtacttgttttaaacttatgcttaaggccacattattgtgcgttcttgctgcattggtttgttatatcgttatgccagtacatacattgtcaatccatgatggttacacaaatgaaatcattggttacaaagccattcaggatggtgtcactcgtgacatcatttctactgatgattgttttgcaaataaacatgctggttttgacgcatggtttagccagcgtggtggttcatacaaaaatgacaaaagctgccctgtagtagctgctatcattacaagagagattggtttcatagtgcctggcttaccgggtactgtgctgagagcaatcaatggtgacttcttgcattttctacctcgtgtttttagtgctgttggcaacatttgctacacaccttccaaactcattgagtatagtgattttgctacctctgcttgcgttcttgctgctgagtgtacaatttttaaggatgctatgggcaaacctgtgccatattgttatgacactaatttgctagagggttctatttcttatagtgagcttcgtccagacactcgttatgtgcttatggatggttccatcatacagtttcctaacacttacctggagggttctgttagagtagtaacaacttttgatgctgagtactgtagacatggtacatgcgaaaggtcagaagtaggtatttgcctatctaccagtggtagatgggttcttaataatgagcattacagagctctatcaggagttttctgtggtgttgatgcgatgaatctcatagctaacatctttactcctcttgtgcaacctgtgggtgctttagatgtgtctgcttcagtagtggctggtggtattattgccatattggtgacttgtgctgcctactactttatgaaattcagacgtgtttttggtgagtacaaccatgttgttgctgctaatgcacttttgtttttgatgtctttcactatactctgtctggtaccagcttacagctttctgccgggagtctactcagtcttttacttgtacttgacattctatttcaccaatgatgtttcattcttggctcaccttcaatggtttgccatgttttctcctattgtgcctttttggataacagcaatctatgtattctgtatttctctgaagcactgccattggttctttaacaactatcttaggaaaagagtcatgtttaatggagttacatttagtaccttcgaggaggctgctttgtgtacctttttgctcaacaaggaaatgtacctaaaattgcgtagcgagacactgttgccacttacacagtataacaggtatcttgctctatataacaagtacaagtatttcagtggagccttagatactaccagctatcgtgaagcagcttgctgccacttagcaaaggctctaaatgactttagcaactcaggtgctgatgttctctaccaaccaccacagacatcaatcacttctgctgttctgcagagtggttttaggaaaatggcattcccgtcaggcaaagttgaagggtgcatggtacaagtaacctgtggaactacaactcttaatggattgtggttggatgacacagtatactgtccaagacatgtcatttgcacagcagaagacatgcttaatcctaactatgaagatctgctcattcgcaaatccaaccatagctttcttgttcaggctggcaatgttcaacttcgtgttattggccattctatgcaaaattgtctgcttaggcttaaagttgatacttctaaccctaagacacccaagtataaatttgtccgtatccaacctggtcaaacattttcagttctagcatgctacaatggttcaccatctggtgtttatcagtgtgccatgagacctaatcataccattaaaggttctttccttaatggatcatgtggtagtgttggttttaacattgattatgattgcgtgtctttctgctatatgcatcatatggagcttccaacaggagtacacgctggtactgacttagaaggtaaattctatggtccatttgttgacagacaaactgcacaggctgcaggtacagacacaaccataacattaaatgttttggcatggctgtatgctgctgttatcaatggtgataggtggtttcttaatagattcaccactactttgaatgactttaaccttgtggcaatgaagtacaactatgaacctttgacacaagatcatgttgacatattgggacctctttctgctcaaacaggaattgccgtcttagatatgtgtgctgctttgaaagagctgctgcagaatggtatgaatggtcgtactatccttggtagcactattttagaagatgagtttacaccatttgatgttgttagacaatgctctggtgttaccttccaaggtaagttcaagaaaattgttaagggcactcatcattggatgcttttaactttcttgacatcactattgattcttgttcaaagtacacagtggtcactgtttttctttgtttacgagaatgctttcttgccatttactcttggtattatggcaattgctgcatgtgctatgctgcttgttaagcataagcacgcattcttgtgcttgtttctgttaccttctcttgcaacagttgcttactttaatatggtctacatgcctgctagctgggtgatgcgtatcatgacatggcttgaattggctgacactagcttgtctggttataggcttaaggattgtgttatgtatgcttcagctttagttttgcttattctcatgacagctcgcactgtttatgatgatgctgctagacgtgtttggacactgatgaatgtcattacacttgtttacaaagtctactatggtaatgctttagatcaagctatttccatgtgggccttagttatttctgtaacctctaactattctggtgtcgttacgactatcatgtttttagctagagctatagtgtttgtgtgtgttgagtattacccattgttatttattactggcaacaccttacagtgtatcatgcttgtttattgtttcttaggctattgttgctgctgctactttggccttttctgtttactcaaccgttacttcaggcttactcttggtgtttatgactacttggtctctacacaagaatttaggtatatgaactcccaggggcttttgcctcctaagagtagtattgatgctttcaagcttaacattaagttgttgggtattggaggtaaaccatgtatcaaggttgctactgtacagtctaaaatgtctgacgtaaagtgcacatctgtggtactgctctcggttcttcaacaacttagagtagagtcatcttctaaattgtgggcacaatgtgtacaactccacaatgatattcttcttgcaaaagacacaactgaagctttcgagaagatggtttctcttttgtctgttttgctatccatgcagggtgctgtagacattaataggttgtgcgaggaaatgctcgataaccgtgctactcttcaggctattgcttcagaatttagttctttaccatcatatgccgcttatgccactgcccaggaggcctatgagcaggctgtagctaatggtgattctgaagtcgttctcaaaaagttaaagaaatctttgaatgtggctaaatctgagtttgaccgtgatgctgccatgcaacgcaagttggaaaagatggcagatcaggctatgacccaaatgtacaaacaggcaagatctgaggacaagagggcaaaagtaactagtgctatgcaaacaatgctcttcactatgcttaggaagcttgataatgatgcacttaacaacattatcaacaatgcgcgtgatggttgtgttccactcaacatcataccattgactacagcagccaaactcatggttgttgtccctgattatggtacctacaagaacacttgtgatggtaacacctttacatatgcatctgcactctgggaaatccagcaagttgttgatgcggatagcaagattgttcaacttagtgaaattaacatggacaattcaccaaatttggcttggcctcttattgttacagctctaagagccaactcagctgttaaactacagaataatgaactgagtccagtagcactacgacagatgtcctgtgcggctggtaccacacaaacagcttgtactgatgacaatgcacttgcctactataacaattcgaagggaggtaggtttgtgctggcattactatcagaccaccaagatctcaaatgggctagattccctaagagtgatggtacaggtacaatttacacagaactggaaccaccttgtaggtttgttacagacacaccaaaagggcctaaagtgaaatacttgtacttcatcaaaggcttaaacaacctaaatagaggtatggtgctgggcagtttagctgctacagtacgtcttcaggctggaaatgctacagaagtacctgccaattcaactgtgctttccttctgtgcttttgcagtagaccctgctaaagcatataaggattacctagcaagtggaggacaaccaatcaccaactgtgtgaagatgttgtgtacacacactggtacaggacaggcaattactgtaacaccagaagctaacatggaccaagagtcctttggtggtgcttcatgttgtctgtattgtagatgccacattgaccatccaaatcctaaaggattctgtgacttgaaaggtaagtacgtccaaatacctaccacttgtgctaatgacccagtgggttttacacttagaaacacagtctgtaccgtctgcggaatgtggaaaggttatggctgtagttgtgaccaactccgcgaacccttgatgcagtctgcggatgcatcaacgtttttaaacgggtttgcggtgtaagtgcagcccgtcttacaccgtgcggcacaggcactagtactgatgtcgtctacagggcttttgatatttacaacgaaaaagttgctggttttgcaaagttcctaaaaactaattgctgtcgcttccaggagaaggatgaggaaggcaatttattagactcttactttgtagttaagaggcatactatgtctaactaccaacatgaagagactatttataacttggttaaagattgtccagcggttgctgtccatgactttttcaagtttagagtagatggtgacatggtaccacatatatcacgtcagcgtctaactaaatacacaatggctgatttagtctatgctctacgtcattttgatgagggtaattgtgatacattaaaagaaatactcgtcacatacaattgctgtgatgatgattatttcaataagaaggattggtatgacttcgtagagaatcctgacatcttacgcgtatatgctaacttaggtgagcgtgtacgccaatcattattaaagactgtacaattctgcgatgctatgcgtgatgcaggcattgtaggcgtactgacattagataatcaggatcttaatgggaactggtacgatttcggtgatttcgtacaagtagcaccaggctgcggagttcctattgtggattcatattactcattgctgatgcccatcctcactttgactagggcattggctgctgagtcccatatggatgctgatctcgcaaaaccacttattaagtgggatttgctgaaatatgattttacggaagagagactttgtctcttcgaccgttattttaaatattgggaccagacataccatcccaattgtattaactgtttggatgataggtgtatccttcattgtgcaaactttaatgtgttattttctactgtgtttccacctacaagttttggaccactagtaagaaaaatatttgtagatggtgttccttttgttgtttcaactggataccattttcgtgagttaggagtcgtacataatcaggatgtaaacttacatagctcgcgtctcagtttcaaggaacttttagtgtatgctgctgatccagctatgcatgcagcttctggcaatttattgctagataaacgcactacatgcttttcagtagctgcactaacaaacaatgttgcttttcaaactgtcaaacccggtaattttaataaagacttttatgactttgctgtgtctaaaggtttctttaaggaaggaagttctgttgaactaaaacacttcttctttgctcaggatggcaacgctgctatcagtgattatgactattatcgttataatctgccaacaatgtgtgatatcagacaactcctattcgtagttgaagttgttgataaatactttgattgttacgatggtggctgtattaatgccaaccaagtaatcgttaacaatctggataaatcagctggtttcccatttaataaatggggtaaggctagactttattatgactcaatgagttatgaggatcaagatgcacttttcgcgtatactaagcgtaatgtcatccctactataactcaaatgaatcttaagtatgccattagtgcaaagaatagagctcgcaccgtagctggtgtctctatctgtagtactatgacaaatagacagtttcatcagaaattattgaagtcaatagccgccactagaggagctactgtggtaattggaacaagcaagttttacggtggctggcataatatgttaaaaactgtttacagtgatgtagaaactccacaccttatgggttgggattatccaaaatgtgacagagccatgcctaacatgcttaggataatggcctctcttgttcttgctcgcaaacataacacttgctgtaacttatcacaccgtttctacaggttagctaacgagtgtgcgcaagtattaagtgagatggtcatgtgtggcggctcactatatgttaaaccaggtggaacatcatccggtgatgctacaactgcttatgctaatagtgtctttaacatttgtcaagctgttacagccaatgtaaatgcacttctttcaactgatggtaataagatagctgacaagtatgtccgcaatctacaacacaggctctatgagtgtctctatagaaatagggatgttgatcatgaattcgtggatgagttttacgcttacctgcgtaaacatttctccatgatgattctttctgatgatgccgttgtgtgctataacagtaactatgcggctcaaggtttagtagctagcattaagaactttaaggcagttctttattatcaaaataatgtgttcatgtctgaggcaaaatgttggactgagactgaccttactaaaggacctcacgaattttgctcacagcatacaatgctagttaaacaaggagatgattacgtgtacctgccttacccagatccatcaagaatattaggcgcaggctgttttgtcgatgatattgtcaaaacagatggtacacttatgattgaaaggttcgtgtcactggctattgatgcttacccacttacaaaacatcctaatcaggagtatgctgatgtctttcacttgtatttacaatacattagaaagttacatgatgagcttactggccacatgttggacatgtattccgtaatgctaactaatgataacacctcacggtactgggaacctgagttttatgaggctatgtacacaccacatacagtcttgcaggctgtaggtgcttgtgtattgtgcaattcacagacttcacttcgttgcggtgcctgtattaggagaccattcctatgttgcaagtgctgctatgaccatgtcatttcaacatcacacaaattagtgttgtctgttaatccctatgtttgcaatgccccgggttgtgatgtcactgatgtgacacaactgtatctaggaggtatgagctattattgcaagtcacataagcctcccattagttttccattatgtgctaatggtcaggtttttggtttatacaaaaacacatgtgtaggcagtgacaatgtcactgacttcaatgcgatagcaacatgtgattggactaatgctggcgattacatacttgccaacacttgtactgagagactcaagcttttcgcagcagaaacgctcaaagccactgaggaaacatttaagctgtcatatggtattgccactgtacgcgaagtactctctgacagagaattgcatctttcatgggaggttggaaaacctagaccaccattgaacagaaactatgtctttactggttaccgtgtaactaaaaatagtaaagtacagattggagagtacacctttgaaaaaggtgactatggtgatgctgttgtgtacagaggtactacgacatacaagttgaatgttggtgattactttgtgttgacatctcacactgtaatgccacttagtgcacctactctagtgccacaagagcactatgtgagaattactggcttgtacccaacactcaacatctcagatgagttttctagcaatgttgcaaattatcaaaaggtcggcatgcaaaagtactctacactccaaggaccacctggtactggtaagagtcattttgccatcggacttgctctctattacccatctgctcgcatagtgtatacggcatgctctcatgcagctgttgatgccctatgtgaaaaggcattaaaatatttgcccatagataaatgtagtagaatcatacctgcgcgtgcgcgcgtagagtgttttgataaattcaaagtgaattcaacactagaacagtatgttttctgcactgtaaatgcattgccagaaacaactgctgacattgtagtctttgatgaaatctctatggctactaattatgacttgagtgttgtcaatgctagacttcgtgcaaaacactacgtctatattggcgatcctgctcaattaccagccccccgcacattgctgactaaaggcacactagaaccagaatattttaattcagtgtgcagacttatgaaaacaataggtccagacatgttccttggaacttgtcgccgttgtcctgctgaaattgttgacactgtgagtgctttagtttatgacaataagctaaaagcacacaaggataagtcagctcaatgcttcaaaatgttctacaaaggtgttattacacatgatgtttcatctgcaatcaacagacctcaaataggcgttgtaagagaatttcttacacgcaatcctgcttggagaaaagctgtttttatctcaccttataattcacagaacgctgtagcttcaaaaatcttaggattgcctacgcagactgttgattcatcacagggttctgaatatgactatgtcatattcacacaaactactgaaacagcacactcttgtaatgtcaaccgcttcaatgtggctatcacaagggcaaaaattggcattttgtgcataatgtctgatagagatctttatgacaaactgcaatttacaagtctagaaataccacgtcgcaatgtggctacattacaagcagaaaatgtaactggactttttaaggactgtagtaagatcattactggtcttcatcctacacaggcacctacacacctcagcgttgatataaagttcaagactgaaggattatgtgttgacataccaggcataccaaaggacatgacctaccgtagactcatctctatgatgggtttcaaaatgaattaccaagtcaatggttaccctaatatgtttatcacccgcgaagaagctattcgtcacgttcgtgcgtggattggctttgatgtagagggctgtcatgcaactagagatgctgtgggtactaacctacctctccagctaggattttctacaggtgttaacttagtagctgtaccgactggttatgttgacactgaaaataacacagaattcaccagagttaatgcaaaacctccaccaggtgaccagtttaaacatcttataccactcatgtataaaggcttgccctggaatgtagtgcgtattaagatagtacaaatgctcagtgatacactgaaaggattgtcagacagagtcgtgttcgtcctttgggcgcatggctttgagcttacatcaatgaagtactttgtcaagattggacctgaaagaacgtgttgtctgtgtgacaaacgtgcaacttgcttttctacttcatcagatacttatgcctgctggaatcattctgtgggttttgactatgtctataacccatttatgattgatgttcagcagtggggctttacgggtaaccttcagagtaaccatgaccaacattgccaggtacatggaaatgcacatgtggctagttgtgatgctatcatgactagatgtttagcagtccatgagtgctttgttaagcgcgttgattggtctgttgaataccctattataggagatgaactgagggttaattctgcttgcagaaaagtacaacacatggttgtgaagtctgcattgcttgctgataagtttccagttcttcatgacattggaaatccaaaggctatcaagtgtgtgcctcaggctgaagtagaatggaagttctacgatgctcagccatgtagtgacaaagcttacaaaatagaggaactcttctattcttatgctacacatcacgataaattcactgatggtgtttgtttgttttggaattgtaacgttgatcgttacccagccaatgcaattgtgtgtaggtttgacacaagagtcttgtcaaacttgaacttaccaggctgtgatggtggtagtttgtatgtgaataagcatgcattccacactccagctttcgataaaagtgcatttactaatttaaagcaattgcctttcttttactattctgatagtccttgtgagtctcatggcaaacaagtagtgtcggatattgattatgttccactcaaatctgctacgtgtattacacgatgcaatttaggtggtgctgtttgcagacaccatgcaaatgagtaccgacagtacttggatgcatataatatgatgatttctgctggatttagcctatggatttacaaacaatttgatacttataacctgtggaatacatttaccaggttacagagtttagaaaatgtggcttataatgttgttaataaaggacactttgatggacacgccggcgaagcacctgtttccatcattaataatgctgtttacacaaaggtagatggtattgatgtggagatctttgaaaataagacaacacttcctgttaatgttgcatttgagctttgggctaagcgtaacattaaaccagtgccagagattaagatactcaataatttgggtgttgatatcgctgctaatactgtaatctgggactacaaaagagaagccccagcacatgtatctacaataggtgtctgcacaatgactgacattgccaagaaacctactgagagtgcttgttcttcacttactgtcttgtttgatggtagagtggaaggacaggtagacctttttagaaacgcccgtaatggtgttttaataacagaaggttcagtcaaaggtctaacaccttcaaagggaccagcacaagctagcgtcaatggagtcacattaattggagaatcagtaaaaacacagtttaactactttaagaaagtagacggcattattcaacagttgcctgaaacctactttactcagagcagagacttagaggattttaagcccagatcacaaatggaaactgactttctcgagctcgctatggatgaattcatacagcgatataagctcgagggctatgccttcgaacacatcgtttatggagatttcagtcatggacaacttggcggtcttcatttaatgataggcttagccaagcgctcacaagattcaccacttaaattagaggattttatccctatggacagcacagtgaaaaattacttcataacagatgcgcaaacaggttcatcaaaatgtgtgtgttctgtgattgatcttttacttgatgactttgtcgagataataaagtcacaagatttgtcagtgatttcaaaagtggtcaaggttacaattgactatgctgaaatttcattcatgctttggtgtaaggatggacatgttgaaaccttctacccaaaactacaagcaagtcaagcgtggcaaccaggtgttgcgatgcctaacttgtacaagatgcaaagaatgcttcttgaaaagtgtgaccttcagaattatggtgaaaatgctgttataccaaaaggaataatgatgaatgtcgcaaagtatactcaactgtgtcaatacttaaatacacttactttagctgtaccctacaacatgagagttattcactttggtgctggctctgataaaggagttgcaccaggtacagctgtgctcagacaatggttgccaactggcacactacttgtcgattcagatcttaatgacttcgtctccgacgcagattctactttaattggagactgtgcaacagtacatacggctaataaatgggaccttattattagcgatatgtatgaccctaggaccaaacatgtgacaaaagagaatgactctaaagaagggtttttcacttatctgtgtggatttataaagcaaaaactagccctgggtggttctatagctgtaaagataacagagcattcttggaatgctgacctttacaagcttatgggccatttctcatggtggacagcttttgttacaaatgtaaatgcatcatcatcggaagcatttttaattggggctaactatcttggcaagccgaaggaacaaattgatggctataccatgcatgctaactacattttctggaggaacacaaatcctatccagttgtcttcctattcactctttgacatgagcaaatttcctcttaaattaagaggaactgctgtaatgtctcttaaggagaatcaaatcaatgatatgatttattctcttctggaaaaaggtaggcttatcattagagaaaacaacagagttgtggtttcaagtgatattcttgttaacaactaaacgaacatgtttattttcttattatttcttactctcactagtggtagtgaccttgaccggtgcaccacttttgatgatgttcaagctcctaattacactcaacatacttcatctatgaggggggtttactatcctgatgaaatttttagatcagacactctttatttaactcaggatttatttcttccattttattctaatgttacagggtttcatactattaatcatacgtttggcaaccctgtcataccttttaaggatggtatttattttgctgccacagagaaatcaaatgttgtccgtggttgggtttttggttctaccatgaacaacaagtcacagtcggtgattattattaacaattctactaatgttgttatacgagcatgtaactttgaattgtgtgacaaccctttctttgctgtttctaaacccatgggtacacagacacatactatgatattcgataatgcatttaattgcactttcgagtacatatctgatgccttttcgcttgatgtttcagaaaagtcaggtaattttaaacacttacgagagtttgtgtttaaaaataaagatgggtttctctatgtttataagggctatcaacctatagatgtagttcgtgatctaccttctggttttaacactttgaaacctatttttaagttgcctcttggtattaacattacaaattttagagccattcttacagccttttcacctgctcaagacatttggggcacgtcagctgcagcctattttgttggctatttaaagccaactacatttatgctcaagtatgatgaaaatggtacaatcacagatgctgttgattgttctcaaaatccacttgctgaactcaaatgctctgttaagagctttgagattgacaaaggaatttaccagacctctaatttcagggttgttccctcaggagatgttgtgagattccctaatattacaaacttgtgtccttttggagaggtttttaatgctactaaattcccttctgtctatgcatgggagagaaaaaaaatttctaattgtgttgctgattactctgtgctctacaactcaacatttttttcaacctttaagtgctatggcgtttctgccactaagttgaatgatctttgcttctccaatgtctatgcagattcttttgtagtcaagggagatgatgtaagacaaatagcgccaggacaaactggtgttattgctgattataattataaattgccagatgatttcatgggttgtgtccttgcttggaatactaggaacattgatgctacttcaactggtaattataattataaatataggtatcttagacatggcaagcttaggccctttgagagagacatatctaatgtgcctttctcccctgatggcaaaccttgcaccccacctgctcttaattgttattggccattaaatgattatggtttttacaccactactggcattggctaccaaccttacagagttgtagtactttcttttgaacttttaaatgcaccggccacggtttgtggaccaaaattatccactgaccttattaagaaccagtgtgtcaattttaattttaatggactcactggtactggtgtgttaactccttcttcaaagagatttcaaccatttcaacaatttggccgtgatgtttctgatttcactgattccgttcgagatcctaaaacatctgaaatattagacatttcaccttgctcttttgggggtgtaagtgtaattacacctggaacaaatgcttcatctgaagttgctgttctatatcaagatgttaactgcactgatgtttctacagcaattcatgcagatcaactcacaccagcttggcgcatatattctactggaaacaatgtattccagactcaagcaggctgtcttataggagctgagcatgtcgacacttcttatgagtgcgacattcctattggagctggcatttgtgctagttaccatacagtttctttattacgtagtactagccaaaaatctattgtggcttatactatgtctttaggtgctgatagttcaattgcttactctaataacaccattgctatacctactaacttttcaattagcattactacagaagtaatgcctgtttctatggctaaaacctccgtagattgtaatatgtacatctgcggagattctactgaatgtgctaatttgcttctccaatatggtagcttttgcacacaactaaatcgtgcactctcaggtattgctgctgaacaggatcgcaacacacgtgaagtgttcgctcaagtcaaacaaatgtacaaaaccccaactttgaaatattttggtggttttaatttttcacaaatattacctgaccctctaaagccaactaagaggtcttttattgaggacttgctctttaataaggtgacactcgctgatgctggcttcatgaagcaatatggcgaatgcctaggtgatattaatgctagagatctcatttgtgcgcagaagttcaatggacttacagtgttgccacctctgctcactgatgatatgattgctgcctacactgctgctctagttagtggtattgccactgctggatggacatttggtgctggcgctgctcttcaaataccttttgctatgcaaatggcatataggttcaatggcattggagttacccaaaatgttctctatgagaaccaaaaacaaatcgccaaccaatttaacaaggcgattagtcaaattcaagaatcacttacaacaacatcaactgcattgggcaagctgcaagacgttgttaaccagaatgctcaagcattaaacacacttgttaaacaacttagctctaattttggtgcaatttcaagtgtgctaaatgatatcctttcgcgacttgataaagtcgaggcggaggtacaaattgacaggttaattacaggcagacttcaaagccttcaaacctatgtaacacaacaactaatcagggctgctgaaatcagggcttctgctaatcttgctgctactaaaatgtctgagtgtgttcttggacaatcaaaaagagttgacttttgtggaaagggctaccaccttatgtccttcccacaagcagccccgcatggtgttgtcttcctacatgtcacgtatgtgccatcccaggagaggaacttcaccacagcgccagcaatttgtcatgaaggcaaagcatacttccctcgtgaaggtgtttttgtgtttaatggcacttcttggtttattacacagaggaacttcttttctccacaaataattactacagacaatacatttgtctcaggaaattgtgatgtcgttattggcatcattaacaacacagtttatgatcctctgcaacctgagcttgactcattcaaagaagagctggacaagtacttcaaaaatcatacatcaccagatgttgatcttggcgacatttcaggcattaacgcttctgtcgtcaacattcaaaaagaaattgaccgcctcaatgaggtcgctaaaaatttaaatgaatcactcattgaccttcaagaattgggaaaatatgagcaatatattaaatggccttggtatgtttggctcggcttcattgctggactaattgccatcgtcatggttacaatcttgctttgttgcatgactagttgttgcagttgcctcaagggtgcatgctcttgtggttcttgctgcaagtttgatgaggatgactctgagccagttctcaagggtgtcaaattacattacacataaacgaacttatggatttgtttatgagattttttactcttggatcaattactgcacagccagtaaaaattgacaatgcttctcctgcaagtactgttcatgctacagcaacgataccgctacaagcctcactccctttcggatggcttgttattggcgttgcatttcttgctgtttttcagagcgctaccaaaataattgcgctcaataaaagatggcagctagccctttataagggcttccagttcatttgcaatttactgctgctatttgttaccatctattcacatcttttgcttgtcgctgcaggtatggaggcgcaatttttgtacctctatgccttgatatattttctacaatgcatcaacgcatgtagaattattatgagatgttggctttgttggaagtgcaaatccaagaacccattactttatgatgccaactactttgtttgctggcacacacataactatgactactgtataccatataacagtgtcacagatacaattgtcgttactgaaggtgacggcatttcaacaccaaaactcaaagaagactaccaaattggtggttattctgaggataggcactcaggtgttaaagactatgtcgttgtacatggctatttcaccgaagtttactaccagcttgagtctacacaaattactacagacactggtattgaaaatgctacattcttcatctttaacaagcttgttaaagacccaccgaatgtgcaaatacacacaatcgacggctcttcaggagttgctaatccagcaatggatccaatttatgatgagccgacgacgactactagcgtgcctttgtaagcacaagaaagtgagtacgaacttatgtactcattcgtttcggaagaaacaggtacgttaatagttaatagcgtacttctttttcttgctttcgtggtattcttgctagtcacactagccatccttactgcgcttcgattgtgtgcgtactgctgcaatattgttaacgtgagtttagtaaaaccaacggtttacgtctactcgcgtgttaaaaatctgaactcttctgaaggagttcctgatcttctggtctaaacgaactaactattattattattctgtttggaactttaacattgcttatcatggcagacaacggtactattaccgttgaggagcttaaacaactcctggaacaatggaacctagtaataggtttcctattcctagcctggattatgttactacaatttgcctattctaatcggaacaggtttttgtacataataaagcttgttttcctctggctcttgtggccagtaacacttgcttgttttgtgcttgctgttgtctacagaattaattgggtgactggcgggattgcgattgcaatggcttgtattgtaggcttgatgtggcttagctacttcgttgcttccttcaggctgtttgctcgtacccgctcaatgtggtcattcaacccagaaacaaacattcttctcaatgtgcctctccgggggacaattgtgaccagaccgctcatggaaagtgaacttgtcattggtgctgtgatcattcgtggtcacttgcgaatggccggacactccctagggcgctgtgacattaaggacctgccaaaagagatcactgtggctacatcacgaacgctttcttattacaaattaggagcgtcgcagcgtgtaggcactgattcaggttttgctgcatacaaccgctaccgtattggaaactataaattaaatacagaccacgccggtagcaacgacaatattgctttgctagtacagtaagtgacaacagatgtttcatcttgttgacttccaggttacaatagcagagatattgattatcattatgaggactttcaggattgctatttggaatcttgacgttataataagttcaatagtgagacaattatttaagcctctaactaagaagaattattcggagttagatgatgaagaacctatggagttagattatccataaaacgaacatgaaaattattctcttcctgacattgattgtatttacatcttgcgagctatatcactatcaggagtgtgttagaggtacgactgtactactaaaagaaccttgcccatcaggaacatacgagggcaattcaccatttcaccctcttgctgacaataaatttgcactaacttgcactagcacacactttgcttttgcttgtgctgacggtactcgacatacctatcagctgcgtgcaagatcagtttcaccaaaacttttcatcagacaagaggaggttcaacaagagctctactcgccactttttctcattgttgctgctctagtatttttaatactttgcttcaccattaagagaaagacagaatgaatgagctcactttaattgacttctatttgtgctttttagcctttctgctattccttgttttaataatgcttattatattttggttttcactcgaaatccaggatctagaagaaccttgtaccaaagtctaaacgaacatgaaacttctcattgttttgacttgtatctctatgcagttgcatatgcactgtagtacagcgctgtgcatctaataaacctcatgtgcttgaagatccttgtaaggtacaacactaggggtaatacttatagcactgcttggctttgtgctctaggaaaggttttaccttttcatagatggcacactatggttcaaacatgcacacctaatgttactatcaactgtcaagatccagctggtggtgcgcttatagctaggtgttggtaccttcatgaaggtcaccaaactgctgcatttagagacgtacttgttgttttaaataaacgaacaaattaaaatgtctgataatggaccccaatcaaaccaacgtagtgccccccgcattacatttggtggacccacagattcaactgacaataaccagaatggaggacgcaatggggcaaggccaaaacagcgccgaccccaaggtttacccaataatactgcgtcttggttcacagctctcactcagcatggcaaggaggaacttagattccctcgaggccagggcgttccaatcaacaccaatagtggtccagatgaccaaattggctactaccgaagagctacccgacgagttcgtggtggtgacggcaaaatgaaagagctcagccccagatggtacttctattacctaggaactggcccagaagcttcacttccctacggcgctaacaaagaaggcatcgtatgggttgcaactgagggagccttgaatacacccaaagaccacattggcacccgcaatcctaataacaatgctgccaccgtgctacaacttcctcaaggaacaacattgccaaaaggcttctacgcagagggaagcagaggcggcagtcaagcctcttctcgctcctcatcacgtagtcgcggtaattcaagaaattcaactcctggcagcagtaggggaaattctcctgctcgaatggctagcggaggtggtgaaactgccctcgcgctattgctgctagacagattgaaccagcttgagagcaaagtttctggtaaaggccaacaacaacaaggccaaactgtcactaagaaatctgctgctgaggcatctaaaaagcctcgccaaaaacgtactgccacaaaacagtacaacgtcactcaagcatttgggagacgtggtccagaacaaacccaaggaaatttcggggaccaagacctaatcagacaaggaactgattacaaacattggccgcaaattgcacaatttgctccaagtgcctctgcattctttggaatgtcacgcattggcatggaagtcacaccttcgggaacatggctgacttatcatggagccattaaattggatgacaaagatccacaattcaaagacaacgtcatactgctgaacaagcacattgacgcatacaaaacattcccaccaacagagcctaaaaaggacaaaaagaaaaagactgatgaagctcagcctttgccgcagagacaaaagaagcagcccactgtgactcttcttcctgcggctgacatggatgatttctccagacaacttcaaaattccatgagtggagcttctgctgattcaactcaggcataaacactcatgatgaccacacaaggcagatgggctatgtaaacgttttcgcaattccgtttacgatacatagtctactcttgtgcagaatgaattctcgtaactaaacagcacaagtaggtttagttaactttaatctcacatagcaatctttaatcaatgtgtaacattagggaggacttgaaagagccaccacattttcatcgaggccacgcggagtacgatcgagggtacagtgaataatgctagggagagctgcctatatggaagagccctaatgtgtaaaattaattttagtagt

SEQ ID NO: 14 - DNA, 29706 bp, SARS coronavirus
tacccaggaaaagccaaccaacctcgatctcttgtagatctgttctctaaacgaactttaaaatctgtgtagctgtcgctcggctgcatgcctagtgcacctacgcagtataaacaataataaattttactgtcgttgacaagaaacgagtaactcgtccctcttctgcagactgcttacggtttcgtccgtgttgcagtcgatcatcagcatacctaggtttcgtccgggtgtgaccgaaaggtaagatggagagccttgttcttggtgtcaacgagaaaacacacgtccaactcagtttgcctgtccttcaggttagagacgtgctagtgcgtggcttcggggactctgtggaagaggccctatcggaggcacgtgaacacctcaaaaatggcacttgtggtctagtagagctggaaaaaggcgtactgccccagcttgaacagccctatgtgttcattaaacgttctgatgccttaagcaccaatcacggccacaaggtcgttgagctggttgcagaaatggacggcattcagtacggtcgtagcggtataacactgggagtactcgtgccacatgtgggcgaaaccccaattgcataccgcaatgttcttcttcgtaagaacggtaataagggagccggtggtcatagctatggcatcgatctaaagtcttatgacttaggtgacgagcttggcactgatcccattgaagattatgaacaaaactggaacactaagcatggcagtggtgcactccgtgaactcactcgtgagctcaatggaggtgcagtcactcgctatgtcgacaacaatttctgtggcccagatgggtaccctcttgattgcatcaaagattttctcgcacgcgcgggcaagtcaatgtgcactctttccgaacaacttgattacatcgagtcgaagagaggtgtctactgctgccgtgaccatgagcatgaaattgcctggttcactgagcgctctgataagagctacgagcaccagacacccttcgaaattaagagtgccaagaaatttgacactttcaaaggggaatgcccaaagtttgtgtttcctcttaactcaaaagtcaaagtcattcaaccacgtgttgaaaagaaaaagactgagggtttcatggggcgtatacgctctgtgtaccctgttgcatctccacaggagtgtaacaatatgcacttgtctaccttgatgaaatgtaatcattgcgatgaagtttcatggcagacgtgcgactttctgaaagccacttgtgaacattgtggcactgaaaatttagttattgaaggacctactacatgtgggtacctacctactaatgctgtagtgaaaatgccatgtcctgcctgtcaagacccagagattggacctgagcatagtgttgcagattatcacaaccactcaaacattgaaactcgactccgcaagggaggtaggactagatgttttggaggctgtgtgtttgcctatgttggctgctataataagcgtgcctactgggttcctcgtgctagtgctgatattggctcaggccatactggcattactggtgacaatgtggagaccttgaatgaggatctccttgagatactgagtcgtgaacgtgttaacattaacattgttggcgattttcatttgaatgaagaggttgccatcattttggcatctttctctgcttctacaagtgcctttattgacactataaagagtcttgattacaagtctttcaaaaccattgttgagtcctgcggtaactataaagttaccaagggaaagcccgtaaaaggtgcttggaacattggacaacagagatcagttttaacaccactgtgtggttttccctcacaggctgctggtgttatcagatcaatttttgcgcgcacacttgatgcagcaaaccactcaattcctgatttgcaaagagcagctgtcaccatacttgatggtatttctgaacagtcattacgtcttgtcgacgccatggtttatacttcagacctgctcaccaacagtgtcattattatggcatatgtaactggtggtcttgtacaacagacttctcagtggttgtctaatcttttgggcactactgttgaaaaactcaggcctatctttgaatggattgaggcgaaacttagtgcaggagttgaatttctcaaggatgcttgggagattctcaaatttctcattacaggtgtttttgacatcgtcaagggtcaaatacaggttgcttcagataacatcaaggattgtgtaaaatgcttcattgatgttgttaacaaggcactcgaaatgtgcattgatcaagtcactatcgctggcgcaaagttgcgatcactcaacttaggtgaagtcttcatcgctcaaagcaagggactttaccgtcagtgtatacgtggcaaggagcagctgcaactactcatgcctcttaaggcaccaaaagaagtaacctttcttgaaggtgattcacatgacacagtacttacctctgaggaggttgttctcaagaacggtgaactcgaagcactcgagacgcccgttgatagcttcacaaatggagctatcgttggcacaccagtctgtgtaaatggcctcatgctcttagagattaaggacaaagaacaatactgcgcattgtctcctggtttactggctacaaacaatgtctttcgcttaaaagggggtgcaccaattaaaggtgtaacctttggagaagatactgtttgggaagttcaaggttacaagaatgtgagaatcacatttgagcttgatgaacgtgttgacaaagtgcttaatgaaaagtgctctgtctacactgttgaatccggtaccgaagttactgagtttgcatgtgttgtagcagaggctgttgtgaagactttacaaccagtttctgatctccttaccaacatgggtattgatcttgatgagtggagtgtagctacattctacttatttgatgatgctggtgaagaaaacttttcatcacgtatgtattgttccttttaccctccagatgaggaagaagaggacgatgcagagtgtgaggaagaagaaattgatgaaacctgtgaacatgagtacggtacagaggatgattatcaaggtctccctctggaatttggtgcctcagctgaaacagttcgagttgaggaagaagaagaggaagactggctggatgatactactgagcaatcagagattgagccagaaccagaacctacacctgaagaaccagttaatcagtttactggttatttaaaacttactgacaatgttgccattaaatgtgttgacatcgttaaggaggcacaaagtgctaatcctatggtgattgtaaatgctgctaacatacacctgaaacatggtggtggtgtagcaggtgcactcaacaaggcaaccaatggtgccatgcaaaaggagagtgatgattacattaagctaaatggccctcttacagtaggagggtcttgtttgctttctggacataatcttgctaagaagtgtctgcatgttgttggacctaacctaaatgcaggtgaggacatccagcttcttaaggcagcatatgaaaatttcaattcacaggacatcttacttgcaccattgttgtcagcaggcatatttggtgctaaaccacttcagtctttacaagtgtgcgtgcagacggttcgtacacaggtttatattgcagtcaatgacaaagctctttatgagcaggttgtcatggattatcttgataacctgaagcctagagtggaagcacctaaacaagaggagccaccaaacacagaagattccaaaactgaggagaaatctgtcgtacagaagcctgtcgatgtgaagccaaaaattaaggcctgcattgatgaggttaccacaacactggaagaaactaagtttcttaccaataagttactcttgtttgctgatatcaatggtaagctttaccatgattctcagaacatgcttagaggtgaagatatgtctttccttgagaaggatgcaccttacatggtaggtgatgttatcactagtggtgatatcacttgtgttgtaataccctccaaaaaggctggtggcactactgagatgctctcaagagctttgaagaaagtgccagttgatgagtatataaccacgtaccctggacaaggatgtgctggttatacacttgaggaagctaagactgctcttaagaaatgcaaatctgcattttatgtactaccttcagaagcacctaatgctaaggaagagattctaggaactgtatcctggaatttgagagaaatgcttgctcatgctgaagagacaagaaaattaatgcctatatgcatggatgttagagccataatggcaaccatccaacgtaagtataaaggaattaaaattcaagagggcatcgttgactatggtgtccgattcttcttttatactagtaaagagcctgtagcttctattattacgaagctgaactctctaaatgagccgcttgtcacaatgccaattggttatgtgacacatggttttaatcttgaagaggctgcgcgctgtatgcgttctcttaaagctcctgccgtagtgtcagtatcatcaccagatgctgttactacatataatggatacctcacttcgtcatcaaagacatctgaggagcactttgtagaaacagtttctttggctggctcttacagagattggtcctattcaggacagcgtacagagttaggtgttgaatttcttaagcgtggtgacaaaattgtgtaccacactctggagagccccgtcgagtttcatcttgacggtgaggttctttcacttgacaaactaaagagtctcttatccctgcgggaggttaagactataaaagtgttcacaactgtggacaacactaatctccacacacagcttgtggatatgtctatgacatatggacagcagtttggtccaacatacttggatggtgctgatgttacaaaaattaaacctcatgtaaatcatgagggtaagactttctttgtactacctagtgatgacacactacgtagtgaagctttcgagtactaccatactcttgatgagagttttcttggtaggtacatgtctgctttaaaccacacaaagaaatggaaatttcctcaagttggtggtttaacttcaattaaatgggctgataacaattgttatttgtctagtgttttattagcacttcaacagcttgaagtcaaattcaatgcaccagcacttcaagaggcttattatagagcccgtgctggtgatgctgctaacttttgtgcactcatactcgcttacagtaataaaactgttggcgagcttggtgatgtcagagaaactatgacccatcttctacagcatgctaatttggaatctgcaaagcgagttcttaatgtggtgtgtaaacattgtggtcagaaaactactaccttaacgggtgtagaagctgtgatgtatatgggtactctatcttatgataatcttaagacaggtgtttccattccatgtgtgtgtggtcgtgatgctacacaatatctagtacaacaagagtcttcttttgttatgatgtctgcaccacctgctgagtataaattacagcaaggtacattcttatgtgcgaatgagtacactggtaactatcagtgtggtcattacactcatataactgctaaggagaccctctatcgtattgacggagctcaccttacaaagatgtcagagtacaaaggaccagtgactgatgttttctacaaggaaacatcttacactacaaccatcaagcctgtgtcgtataaactcgatggagttacttacacagagattgaaccaaaattggatgggtattataaaaaggataatgcttactatacagagcagcctatagaccttgtaccaactcaaccattaccaaatgcgagttttgataatttcaaactcacatgttctaacacaaaatttgctgatgatttaaatcaaatgacaggcttcacaaagccagcttcacgagagctatctgtcacattcttcccagacttgaatggcgatgtagtggctattgactatagacactattcagcgagtttcaagaaaggtgctaaattactgcataagccaattgtttggcacattaaccaggctacaaccaagacaacgttcaaaccaaacacttggtgtttacgttgtctttggagtacaaagccagtagatacttcaaattcatttgaagttctggcagtagaagacacacaaggaatggacaatcttgcttgtgaaagtcaacaacccacctctgaagaagtagtggaaaatcctaccatacagaaggaagtcatagagtgtgacgtgaaaactaccgaagttgtaggcaatgtcatacttaaaccatcagatgaaggtgttaaagtaacacaagagttaggtcatgaggatcttatggctgcttatgtggaaaacacaagcattaccattaagaaacctaatgagctttcactagccttaggtttaaaaacaattgccactcatggtattgctgcaattaatagtgttccttggagtaaaattttggcttatgtcaaaccattcttaggacaagcagcaattacaacatcaaattgcgctaagagattagcacaacgtgtgtttaacaattatatgccttatgtgtttacattattgttccaattgtgtacttttactaaaagtaccaattctagaattagagcttcactacctacaactattgctaaaaatagtgttaagagtgttgctaaattatgtttggatgccggcattaattatgtgaagtcacccaaattttctaaattgttcacaatcgctatgtggctattgttgttaagtatttgcttaggttctctaatctgtgtaactgctgcttttggtgtactcttatctaattttggtgctccttcttattgtaatggcgttagagaattgtatcttaattcgtctaacgttactactatggatttctgtgaaggttcttttccttgcagcatttgtttaagtggattagactcccttgattcttatccagctcttgaaaccattcaggtgacgatttcatcgtacaagctagacttgacaattttaggtctggccgctgagtgggttttggcatatatgttgttcacaaaattcttttatttattaggtctttcagctataatgcaggtgttctttggctattttgctagtcatttcatcagcaattcttggctcatgtggtttatcattagtattgtacaaatggcacccgtttctgcaatggttaggatgtacatcttctttgcttctttctactacatatggaagagctatgttcatatcatggatggttgcacctcttcgacttgcatgatgtgctataagcgcaatcgtgccacacgcgttgagtgtacaactattgttaatggcatgaagagatctttctatgtctatgcaaatggaggccgtggcttctgcaagactcacaattggaattgtctcaattgtgacacattttgcactggtagtacattcattagtgatgaagttgctcgtgatttgtcactccagtttaaaagaccaatcaaccctactgaccagtcatcgtatattgttgatagtgttgctgtgaaaaatggcgcgcttcacctctactttgacaaggctggtcaaaagacctatgagagacatccgctctcccattttgtcaatttagacaatttgagagctaacaacactaaaggttcactgcctattaatgtcatagtttttgatggcaagtccaaatgcgacgagtctgcttctaagtctgcttctgtgtactacagtcagctgatgtgccaacctattctgttgcttgaccaagctcttgtatcagacgttggagatagtactgaagtttccgttaagatgtttgatgcttatgtcgacaccttttcagcaacttttagtgttcctatggaaaaacttaaggcacttgttgctacagctcacagcgagttagcaaagggtgtagctttagatggtgtcctttctacattcgtgtcagctgcccgacaaggtgttgttgataccgatgttgacacaaaggatgttattgaatgtctcaaactttcacatcactctgacttagaagtgacaggtgacagttgtaacaatttcatgctcacctataataaggttgaaaacatgacgcccagagatcttggcgcatgtattgactgtaatgcaaggcatatcaatgcccaagtagcaaaaagtcacaatgtttcactcatctggaatgtaaaagactacatgtctttatctgaacagctgcgtaaacaaattcgtagtgctgccaagaagaacaacataccttttagactaacttgtgctacaactagacaggttgtcaatgtcataactactaaaatctcactcaagggtggtaagattgttagtacttgttttaaacttatgcttaaggccacattattgtgcgttcttgctgcattggtttgttatatcgttatgccagtacatacattgtcaatccatgatggttacacaaatgaaatcattggttacaaagccattcaggatggtgtcactcgtgacatcatttctactgatgattgttttgcaaataaacatgctggttttgacgcatggtttagccagcgtggtggttcatacaaaaatgacaaaagctgccctgtagtagctgctatcattacaagagagattggtttcatagtgcctggcttaccgggtactgtgctgagagcaatcaatggtgacttcttgcattttctacctcgtgtttttagtgctgttggcaacatttgctacacaccttccaaactcattgagtatagtgattttgctacctctgcttgcgttcttgctgctgagtgtacaatttttaaggatgctatgggcaaacctgtgccatattgttatgacactaatttgctagagggttctatttcttatagtgagcttcgtccagacactcgttatgtgcttatggatggttccatcatacagtttcctaacacttacctggagggttctgttagagtagtaacaacttttgatgctgagtactgtagacatggtacatgcgaaaggtcagaagtaggtatttgcctatctaccagtggtagatgggttcttaataatgagcattacagagctctatcaggagttttctgtggtgttgatgcgatgaatctcatagctaacatctttactcctcttgtgcaacctgtgggtgctttagatgtgtctgcttcagtagtggctggtggtattattgccatattggtgacttgtgctgcctactactttatgaaattcagacgtgtttttggtgagtacaaccatgttgttgctgctaatgcacttttgtttttgatgtctttcactatactctgtctggtaccagcttacagctttctgccgggagtctactcagtcttttacttgtacttgacattctatttcaccaatgatgtttcattcttggctcaccttcaatggtttgccatgttttctcctattgtgcctttttggataacagcaatctatgtattctgtatttctctgaagcactgccattggttctttaacaactatcttaggaaaagagtcatgtttaatggagttacatttagtaccttcgaggaggctgctttgtgtacctttttgctcaacaaggaaatgtacctaaaattgcgtagcgagacactgttgccacttacacagtataacaggtatcttgctctatataacaagtacaagtatttcagtggagccttagatactaccagctatcgtgaagcagcttgctgccacttagcaaaggctctaaatgactttagcaactcaggtgctgatgttctctaccaaccaccacagacatcaatcacttctgctgttctgcagagtggttttaggaaaatggcattcccgtcaggcaaagttgaagggtgcatggtacaagtaacctgtggaactacaactcttaatggattgtggttggatgacacagtatactgtccaagacatgtcatttgcacagcagaagacatgcttaatcctaactatgaagatctgctcattcgcaaatccaaccatagctttcttgttcaggctggcaatgttcaacttcgtgttattggccattctatgcaaaattgtctgcttaggcttaaagttgatacttctaaccctaagacacccaagtataaatttgtccgtatccaacctggtcaaacattttcagttctagcatgctacaatggttcaccatctggtgtttatcagtgtgccatgagacctaatcataccattaaaggttctttccttaatggatcatgtggtagtgttggttttaacattgattatgattgcgtgtctttctgctatatgcatcatatggagcttccaacaggagtacacgctggtactgacttagaaggtaaattctatggtccatttgttgacagacaaactgcacaggctgcaggtacagacacaaccataacattaaatgttttggcatggctgtatgctgctgttatcaatggtgataggtggtttcttaatagattcaccactactttgaatgactttaaccttgtggcaatgaagtacaactatgaacctttgacacaagatcatgttgacatattgggacctctttctgctcaaacaggaattgccgtcttagatatgtgtgctgctttgaaagagctgctgcagaatggtatgaatggtcgtactatccttggtagcactattttagaagatgagtttacaccatttgatgttgttagacaatgctctggtgttaccttccaaggtaagttcaagaaaattgttaagggcactcatcattggatgcttttaactttcttgacatcactattgattcttgttcaaagtacacagtggtcactgtttttctttgtttacgagaatgctttcttgccatttactcttggtattatggcaattgctgcatgtgctatgctgcttgttaagcataagcacgcattcttgtgcttgtttctgttaccttctcttgcaacagttgcttactttaatatggtctacatgcctgctagctgggtgatgcgtatcatgacatggcttgaattggctgacactagcttgtctggttataggcttaaggattgtgttatgtatgcttcagctttagttttgcttattctcatgacagctcgcactgtttatgatgatgctgctagacgtgtttggacactgatgaatgtcattacacttgtttacaaagtctactatggtaatgctttagatcaagctatttccatgtgggccttagttatttctgtaacctctaactattctggtgtcgttacgactatcatgtttttagctagagctatagtgtttgtgtgtgttgagtattacccattgttatttattactggcaacaccttacagtgtatcatgcttgtttattgtttcttaggctattgttgctgctgctactttggccttttctgtttactcaaccgttacttcaggcttactcttggtgtttatgactacttggtctctacacaagaatttaggtatatgaactcccaggggcttttgcctcctaagagtagtattgatgctttcaagcttaacattaagttgttgggtattggaggtaaaccatgtatcaaggttgctactgtacagtctaaaatgtctgacgtaaagtgcacatctgtggtactgctctcggttcttcaacaacttagagtagagtcatcttctaaattgtgggcacaatgtgtacaactccacaatgatattcttcttgcaaaagacacaactgaagctttcgagaagatggtttctcttttgtctgttttgctatccatgcagggtgctgtagacattaataggttgtgcgaggaaatgctcgataaccgtgctactcttcaggctattgcttcagaatttagttctttaccatcatatgccgcttatgccactgcccaggaggcctatgagcaggctgtagctaatggtgattctgaagtcgttctcaaaaagttaaagaaatctttgaatgtggctaaatctgagtttgaccgtgatgctgccatgcaacgcaagttggaaaagatggcagatcaggctatgacccaaatgtacaaacaggcaagatctgaggacaagagggcaaaagtaactagtgctatgcaaacaatgctcttcactatgcttaggaagcttgataatgatgcacttaacaacattatcaacaatgcgcgtgatggttgtgttccactcaacatcataccattgactacagcagccaaactcatggttgttgtccctgattatggtacctacaagaacacttgtgatggtaacacctttacatatgcatctgcactctgggaaatccagcaagttgttgatgcggatagcaagcatgttcaacttagtgaaattaacatggacaattcaccaaatttggcttggcctcttattgttacagctctaagagccaactcagctgttaaactacagaataatgaactgagtccagtagcactacgacagatgtcctgtgcggctggtaccacacaaacagcttgtactgatgacaatgcacttgcctactataacaattcgaagggaggtaggtttgtgctggcattactatcagaccaccaagatctcaaatgggctagattccctaagagtgatggtacaggtacaatttacacagaactggaaccaccttgtaggtttgttacagacacaccaaaagggcctaaagtgaaatacttgtacttcatcaaaggcttaaacaacctaaatagaggtatggtgctgggcagtttagctgctacagtacgtcttcaggctggaaatgctacagaagtacctgcccattcaactgtgctttccttctgtgcttttgcagtagaccctgctaaagcatataaggattacctagcaagtggaggacaaccaatcaccaactgtgtgaagatgttgtgtacacacactggtacaggacaggcaattactgtaacaccagaagctaacatggaccaagagtcctttggtggtgcttcatgttgtctgtattgtagatgccacattgaccatccaaatcctaaaggattctgtgacttgaaaggtaagtacgtccaaatacctaccacttgtgctaatgacccagtgggttttacacttagaaacacagtctgtaccgtctgcggaatgtggaaaggttatggctgtagttgtgaccaactccgcgaacccttgatgcagtctgcggatgcatcaacgtttttaaacgggtttgcggtgtaagtgcagcccgtcttacaccgtgcggcacaggcactagtactgatgtcgtctacagggcttttgatatttacaacgaaaaagttgctggttttgcaaagttcctaaaaactaattgctgtcgcttccaggagaaggatgaggaaggcaatttattagactcttactttgtagttaagaggcatactatgtctaactaccaacatgaagagactatttataacttggttaaagattgtccagcggttgctgtccatgactttttcaagtttagagtagatggtgacatggtaccacatatatcacgtcagcgtctaactaaatacacaatggctgatttagtctatgctctacgtcattttgatgagggtaattgtgatacattaaaagaaatactcgtcacatacaattgctgtgatgatgattatttcaataagaaggattggtatgacttcgtagagaatcctgacatcttacgcgtatatgctaacttaggtgagcgtgtacgccaatcattattaaagactgtacaattctgcgatgctatgcgtgatgcaggcattgtaggcgtactgacattagataatcaggatcttaatgggaactggtacgatttcggtgatttcgaacaagtagcaccaggctgcggagttcctattgtggattcatattactcattgctgatgcccatcctcactttgactagggcattggctgctgagtcccatatggatgctgatctcgcaaaaccacttattaagtgggatttgctgaaatatgattttacggaagagagactttgtctcttcgaccgttattttaaatattgggaccagacataccatcccaattgtattaactgtttggatgataggtgtatccttcattgtgcaaactttaatgtgttattttctactgtgtttccacctacaagttttggaccactagtaagaaaaatatttgtagatggtgttccttttgttgtttcaactggataccattttcgtgagttaggagtcgtacataatcaggatgtaaacttacatagctcgcgtctcagtttcaaggaacttttagtgtatgctgctgatccagctatgcatgcagcttctggcaatttattgctagataaacgcactacatgcttttcagtagctgcactaacaaacaatgttgcttttcaaactgtcaaacccggtaattttaataaagacttttatgactttgctgtgtctaaaggtttctttaaggaaggaagttctgttgaactaaaacacttcttctttgctcaggatggcaacgctgctatcagtgattatgactattatcgttataatctgccaacaatgtgtgatatcagacaactcctattcgtagttgaagttgttgataaatactttgattgttacgatggtggctgtattaatgccaaccaagtaatcgttaacaatctggataaatcagctggtttcccatttaataaatggggtaaggctagactttattatgactcaatgagttatgaggatcaagatgcacttttcgcgtatactaagcgtaatgtcatccctactataactctaatgaatcttaagtatgccattagtgcaaagaatagagctcgcaccgtagctggtgtctctatctgtagtactatgacaaatagacagtttcatcagaaattattgaagtcaatagccgccactagaggagctactgtggtaattggaacaagcaagttttacggtggctggcataatatgttaaaaactgtttacagtgatgtagaaactccacaccttatgggttgggattatccaaaatgtgacagagccatgcctaacatgcttaggataatggcctctcttgttcttgctcgcaaacataacacttgctgtaacttatcacaccgtttctacaggttagctaacgagtgtgcgcaagtattaagtgagatggtcatgtgtggcggctcactatatgttaaaccaggtggaacatcatccggtgatgctacaactgcttatgctaatagtgtctttaacatttgtcaagctgttacagccaatgtaaatgcacttctttcaactgatggtaataagatagctgacaagtatgtccgcaatctacaacacaggctctatgagtgtctctatagaaatagggatgttgatcatgaattcgtggatgagttttacgcttacctgcgtaaacatttctccatgatgattctttctgatgatgccgttgtgtgctataacagtaactatgcggctcaaggtttagtagctagcattaagaactttaaggcagttctttattatcaaaataatgtgttcatgtctgaggcaaaatgttggactgagactgaccttactaaaggacctcacgaattttgctcacagcatacaatgctagttaaacaaggagatgattacgtgtacctgccttacccagatccatcaagaatattaggcgcaggctgttttgtcgatgatattgtcaaaacagatggtacacttatgattgaaaggttcgtgtcactggctattgatgcttacccacttacaaaacatcctaatcaggagtatgctgatgtctttcacttgtatttacaatacattagaaagttacatgatgagcttactggccacatgttggacatgtattccgtaatgctaactaatgataacacctcacggtactgggaacctgagttttatgaggctatgtacacaccacatacagtcttgcaggctgtaggtgcttgtgtattgtgcaattcacagacttcacttcgttgcggtgcctgtattaggagaccattcctatgttgcaagtgctgctatgaccatgtcatttcaacatcacacaaattagtgttgtctgttaatccctatgtttgcaatgccccaggttgtgatgtcactgatgtgacacaactgtatctaggaggtatgagctattattgcaagtcacataagcctcccattagttttccattatgtgctaatggtcaggtttttggtttatacaaaaacacatgtgtaggcagtgacaatgtcactgacttcaatgcgatagcaacatgtgattggactaatgctggcgattacatacttgccaacacttgtactgagagactcaagcttttcgcagcagaaacgctcaaagccactgaggaaacatttaagctgtcatatggtattgccactgtacgcgaagtactctctgacagagaattgcatctttcatgggaggttggaaaacctagaccaccattgaacagaaactatgtctttactggttaccgtgtaactaaaaatagtaaagtacagattggagagtacacctttgaaaaaggtgactatggtgatgctgttgtgtacagaggtactacgacatacaagttgaatgttggtgattactttgtgttgacatctcacactgtaatgccacttagtgcacctactctagtgccacaagagcactatgtgagaattactggcttgtacccaacactcaacatctcagatgagttttctagcaatgttgcaaattatcaaaaggtcggcatgcaaaagtactctacactccaaggaccacctggtactggtaagagtcattttgccatcggacttgctctctattacccatctgctcgcatagtgtatacggcatgctctcatgcagctgttgatgccctatgtgaaaaggcattaaaatatttgcccatagataaatgtagtagaatcatacctgcgcgtgcgcgcgtagagtgttttgataaattcaaagtgaattcaacactagaacagtatgttttctgcactgtaaatgcattgccagaaacaactgctgacattgtagtctttgatgaaatctctatggctactaattatgacttgagtgttgtcaatgctagacttcgtgcaaaacactacgtctatattggcgatcctgctcaattaccagccccccgcacattgctgactaaaggcacactagaaccagaatattttaattcagtgtgcagacttatgaaaacaataggtccagacatgttccttggaacttgtcgctgttgtcctgctgaaattgttgacactgtgagtgctttagtatatgacaataagctaaaagcacacaaggataagtcagctcaatgcttcaaaatgttctacaaaggtgttattacacatgatgtttcatctgcaatcaacagacctcaaataggcgttgtaagagaatttcttacacgcaatcctgcttggagaaaagctgtttttatctcaccttataattcacagaacgctgtagcttcaaaaatcttaggattgcctacgcagactgttgattcatcacagggttctgaatatgactatgtcatattcacacaaactactgaaacagcacactcttgtaatgtcaaccgcttcaatgtggctatcacaagggcaaaaattggcattttgtgcataatgtctgatagagatctttatgacaaactgcaatttacaagtctagaaataccacgtcgcaatgtggctacattacaagcagaaaatgtaactggactttttaaggactgtagtaagatcattactggtcttcatcctacacaggcacctacacacctcagcgttgatataaagttcaagactgaaggattatgtgttgacataccaggcataccaaaggacatgacctaccgtagactcatctctatgatgggtttcaaaatgaattaccaagtcaatggttaccctaatatgtttatcacccgcgaagaagctattcgtcacgttcgtgcgtggattggctttgatgtagagggctgtcatgcaactagagatgctgtgggtactaacctacctctccagctaggattttctacaggtgttaacttagtagctgtaccgactggttatgttgacactgaaaataacacagaattcaccagagttaatgcaaaacctccaccaggtgaccagtttaaacatcttataccactcatgtataaaggcttgccctggaatgtagtgcgtattaagatagtacaaatgctcagtgatacactgaaaggattgtcagacagagtcgtgttcgtcctttgggcgcatggctttgagcttacatcaatgaagtactttgtcaagattggacctgaaagaacgtgttgtctgtgtgacaaacgtgcaacttgcttttctacttcatcagatacttatgcctgctggaatcattctgtgggttttgactatgtctataacccatttatgattgatgttcagcagtggggctttacgggtaaccttcagagtaaccatgaccaacattgccaggtacatggaaatgcacatgtggctagttgtgatgctatcatgactagatgtttagcagtccatgagtgctttgttaagcgcgttgattggtctgttgaataccctattataggagatgaactgagggttaattctgcttgcagaaaagtacaacacatggttgtgaagtctgcattgcttgctgataagtttccagttcttcatgacattggaaatccaaaggctatcaagtgtgtgcctcaggctgaagtagaatggaagttctacgatgctcagccatgtagtgacaaagcttacaaaatagaggaactcttctattcttatgctacacatcacgataaattcactgatggtgtttgtttgttttggaattgtaacgttgatcgttacccagccaatgcaattgtgtgtaggtttgacacaagagtcttgtcaaacttgaacttaccaggctgtgatggtggtagtttgtatgtgaataagcatgcattccacactccagctttcgataaaagtgcatttactaatttaaagcaattgcctttcttttactattctgatagtccttgtgagtctcatggcaaacaagtagtgtcggatattgattatgttccactcaaatctgctacgtgtattacacgatgcaatttaggtggtgctgtttgcagacaccatgcaaatgagtaccgacagtacttggatgcatataatatgatgatttctgctggatttagcctatggatttacaaacaatttgatacttataacctgtggaatacatttaccaggttacagagtttagaaaatgtggcttataatgttgttaataaaggacactttgatggacacgccggcgaagcacctgtttccatcattaataatgctgtttacacaaaggtagatggtattgatgtggagatctttgaaaataagacaacacttcctgttaatgttgcatttgagctttgggctaagcgtaacattaaaccagtgccagagattaagatactcaataatttgggtgttgatatcgctgctaatactgtaatctgggactacaaaagagaagccccagcacatgtatctacaataggtgtctgcacaatgactgacattgccaagaaacctactgagagtgcttgttcttcacttactgtcttgtttgatggtagagtggaaggacaggtagacctttttagaaacgcccgtaatggtgttttaataacagaaggttcagtcaaaggtctaacaccttcaaagggaccagcacaagctagcgtcaatggagtcacattaattggagaatcagtaaaaacacagtttaactactttaagaaagtagacggcattattcaacagttgcctgaaacctactttactcagagcagagacttagaggattttaagcccagatcacaaatggaaactgactttctcgagctcgctatggatgaattcatacagcgatataagctcgagggctatgccttcgaacacatcgtttatggagatttcagtcatggacaacttggcggtcttcatttaatgataggcttagccaagcgctcacaagattcaccacttaaattagaggattttatccctatggacagcacagtgaaaaattacttcataacagatgcgcaaacaggttcatcaaaatgtgtgtgttctgtgattgatcttttacttgatgactttgtcgagataataaagtcacaagatttgtcagtgatttcaaaagtggtcaaggttacaattgactatgctgaaatttcattcatgctttggtgtaaggatggacatgttgaaaccttctacccaaaactacaagcaagtcaagcgtggcaaccaggtgttgcgatgcctaacttgtacaagatgcaaagaatgcttcttgaaaagtgtgaccttcagaattatggtgaaaatgctgttataccaaaaggaataatgatgaatgtcgcaaagtatactcaactgtgtcaatacttaaatacacttactttagctgtaccctacaacatgagagttattcactttggtgctggctctgataaaggagttgcaccaggtacagctgtgctcagacaatggttgccaactggcacactacttgtcgattcagatcttaatgacttcgtctccgacgcagattctactttaattggagactgtgcaacagtacatacggctaataaatgggaccttattattagcgatatgtatgaccctaggaccaaacatgtgacaaaagagaatgactctaaagaagggtttttcacttatctgtgtggatttataaagcaaaaactagccctgggtggttctatagctgtaaagataacagagcattcttggaatgctgacctttacaagcttatgggccatttctcatggtggacagcttttgttacaaatgtaaatgcatcatcatcggaagcatttttaattggggctaactatcttggcaagccgaaggaacaaattgatggctataccatgcatgctaactacattttctggaggaacacaaatcctatccagttgtcttcctattcactctttgacatgagcaaatttcctcttaaattaagaggaactgctgtaatgtctcttaaggagaatcaaatcaatgatatgatttattctcttctggaaaaaggtaggcttatcattagagaaaacaacagagttgtggtttcaagtgatattcttgttaacaactaaacgaacatgtttattttcttattatttcttactctcactagtggtagtgaccttgaccggtgcaccacttttgatgatgttcaagctcctaattacactcaacatacttcatctatgaggggggtttactatcctgatgaaatttttagatcagacactctttatttaactcaggatttatttcttccattttattctaatgttacagggtttcatactattaatcatacgtttggcaaccctgtcataccttttaaggatggtatttattttgctgccacagagaaatcaaatgttgtccgtggttgggtttttggttctaccatgaacaacaagtcacagtcggtgattattattaacaattctactaatgttgttatacgagcatgtaactttgaattgtgtgacaaccctttctttgctgtttctaaacccatgggtacacagacacatactatgatattcgataatgcatttaattgcactttcgagtacatatctgatgccttttcgcttgatgtttcagaaaagtcaggtaattttaaacacttacgagagtttgtgtttaaaaataaagatgggtttctctatgtttataagggctatcaacctatagatgtagttcgtgatctaccttctggttttaacactttgaaacctatttttaagttgcctcttggtattaacattacaaattttagagccattcttacagccttttcacctgctcaagacatttggggcacgtcagctgcagcctattttgttggctatttaaagccaactacatttatgctcaagtatgatgaaaatggtacaatcacagatgctgttgattgttctcaaaatccacttgctgaactcaaatgctctgttaagagctttgagattgacaaaggaatttaccagacctctaatttcagggttgttccctcaggagatgttgtgagattccctaatattacaaacttgtgtccttttggagaggtttttaatgctactaaattcccttctgtctatgcatgggagagaaaaaaaatttctaattgtgttgctgattactctgtgctctacaactcaacatttttttcaacctttaagtgttatggcgtttctgccactaagttgaatgatctttgcttctccaatgtctatgcagattcttttgtagtcaagggagatgatgtaagacaaatagcgccaggacaaactggtgttattgctgattataattataaattgccagatgatttcatgggttgtgtccttgcttggaatactaggaacattgatgctacttcaactggtaattataattataaatataggtatcttagacatggcaagcttaggccctttgagagagacatatctaatgtgcctttctcccctgatggcaaaccttgcaccccacctgctcttaattgttattggccattaaatgattatggtttttacaccactactggcattggctaccaaccttacagagttgtagtactttcttttgaacttttaaatgcaccggccacggtttgtggaccaaaattatccactgaccttattaagaaccagtgtgtcaattttaattttaatggactcactggtactggtgtgttaactccttcttcaaagagatttcaaccatttcaacaatttggccgtgatgtttctgatttcactgattccgttcgagatcctaaaacatctgaaatattagacatttcaccttgctcttttgggggtgtaagtgtaattacacctggaacaaatgcttcatctgaagttgctgttctatatcaagatgttaactgcactgatgtttctacagcaattcatgcagatcaactcacaccagcttggcgcatatattctactggaaacaatgtattccagactcaagcaggctgtcttataggagctgagcatgtcgacacttcttatgagtgcgacattcctattggagctggcatttgtgctagttaccatacagtttctttattacgtagtactagccaaaaatctattgtggcttatactatgtctttaggtgctgatagttcaattgcttactctaataacaccattgctatacctactaacttttcaattagcattactacagaagtaatgcctgtttctatggctaaaacctccgtagattgtaatatgtacatctgcggagattctactgaatgtgctaatttgcttctccaatatggtagcttttgcacacaactaaatcgtgcactctcaggtattgctgctgaacaggatcgcaacacacgtgaagtgttcgctcaagtcaaacaaatgtacaaaaccccaactttgaaatattttggtggttttaatttttcacaaatattacctgaccctctaaagccaactaagaggtcttttattgaggacttgctctttaataaggtgacactcgctgatgctggcttcatgaagcaatatggcgaatgcctaggtgatattaatgctagagatctcatttgtgcgcagaagttcaatggacttacagtgttgccacctctgctcactgatgatatgattgctgcctacactgctgctctagttagtggtactgccactgctggatggacatttggtgctggcgctgctcttcaaataccttttgctatgcaaatggcatataggttcaatggcattggagttacccaaaatgttctctatgagaaccaaaaacaaatcgccaaccaatttaacaaggcgattagtcaaattcaagaatcacttacaacaacatcaactgcattgggcaagctgcaagacgttgttaaccagaatgctcaagcattaaacacacttgttaaacaacttagctctaattttggtgcaatttcaagtgtgctaaatgatatcctttcgcgacttgataaagtcgaggcggaggtacaaattgacaggttaattacaggcagacttcaaagccttcaaacctatgtaacacaacaactaatcagggctgctgaaatcagggcttctgctaatcttgctgctactaaaatgtctgagtgtgttcttggacaatcaaaaagagttgacttttgtggaaagggctaccaccttatgtccttcccacaagcagccccgcatggtgttgtcttcctacatgtcacgtatgtgccatcccaggagaggaacttcaccacagcgccagcaatttgtcatgaaggcaaagcatacttccctcgtgaaggtgtttttgtgtttaatggcacttcttggtttattacacagaggaacttcttttctccacaaataattactacagacaatacatttgtctcaggaaattgtgatgtcgttattggcatcattaacaacacagtttatgatcctctgcaacctgagcttgactcattcaaagaagagctggacaagtacttcaaaaatcatacatcaccagatgttgatcttggcgacatttcaggcattaacgcttctgtcgtcaacattcaaaaagaaattgaccgcctcaatgaggtcgctaaaaatttaaatgaatcactcattgaccttcaagaattgggaaaatatgagcaatatattaaatggccttggtatgtttggctcggcttcattgctggactaattgccatcgtcatggttacaatcttgctttgttgcatgactagttgttgcagttgcctcaagggtgcatgctcttgtggttcttgctgcaagtttgatgaggatgactctgagccagttctcaagggtgtcaaattacattacacataaacgaacttatggatttgtttatgagattttttactcttggatcaattactgcacagccagtaaaaattgacaatgcttctcctgcaagtactgttcatgctacagcaacgataccgctacaagcctcactccctttcggatggcttgttattggcgttgcatttcttgctgtttttcagagcgctaccaaaataattgcgctcaataaaagatggcagctagccctttataagggcttccagttcatttgcaatttactgctgctatttgttaccatctattcacatcttttgcttgtcgctgcaggtatggaggcgcaatttttgtacctctatgccttgatatattttctacaatgcatcaacgcatgtagaattattatgagatgttggctttgttggaagtgcaaatccaagaacccattactttatgatgccaactactttgtttgctggcacacacataactatgactactgtataccatataacagtgtcacagatacaattgtcgttactgaaggtgacggcatttcaacaccaaaactcaaagaagactaccaaattggtggttattctgaggataggcactcaggtgttaaagactatgtcgttgtacatggctatttcaccgaagtttactaccagcttgagtctacacaaattactacagacactggtattgaaaatgctacattcttcatctttaacaagcttgttaaagacccaccgaatgtgcaaatacacacaatcgacggctcttcaggagttgctaatccagcaatggatccaatttatgatgagccgacgacgactactagcgtgcctttgtaagcacaagaaagtgagtacgaacttatgtactcattcgtttcggaagaaacaggtacgttaatagttaatagcgtacttctttttcttgctttcgtggtattcttgctagtcacactagccatccttactgcgcttcgattgtgtgcgtactgctgcaatattgttaacgtgagtttagtaaaaccaacggtttacgtctactcgcgtgttaaaaatctgaactcttctgaaggagttcctgatcttctggtctaaacgaactaactattattattattctgtttggaactttaacattgcttatcatggcagacaacggtactattaccgttgaggagcttaaacaactcctggaacaatggaacctagtaataggtttcctattcctagcctggattatgttactacaatttgcctattctaatcggaacaggtttttgtacataataaagcttgttttcctctggctcttgtggccagtaacacttgcttgttttgtgcttgctgctgtctacagaattaattgggtgactggcgggattgcgattgcaatggcttgtattgtaggcttgatgtggcttagctacttcgttgcttccttcaggctgtttgctcgtacccgctcaatgtggtcattcaacccagaaacaaacattcttctcaatgtgcctctccgggggacaattgtgaccagaccgctcatggaaagtgaacttgtcattggtgctgtgatcattcgtggtcacttgcgaatggccggacactccctagggcgctgtgacattaaggacctgccaaaagagatcactgtggctacatcacgaacgctttcttattacaaattaggagcgtcgcagcgtgtaggcactgattcaggttttgctgcatacaaccgctaccgtattggaaactataaattaaatacagaccacgccggtagcaacgacaatattgctttgctagtacagtaagtgacaacagatgtttcatcttgttgacttccaggttacaatagcagagatattgattatcattatgaggactttcaggattgctatttggaatcttgacgttataataagttcaatagtgagacaattatttaagcctctaactaagaagaattattcggagttagatgatgaagaacctatggagttagattatccataaaacgaacatgaaaattattctcttcctgacattgattgtatttacatcttgcgagctatatcactatcaggagtgtgttagaggtacgactgtactactaaaagaaccttgcccatcaggaacatacgagggcaattcaccatttcaccctcttgctgacaataaatttgcactaacttgcactagcacacactttgcttttgcttgtgctgacggtactcgacatacctatcagctgcgtgcaagatcagtttcaccaaaacttttcatcagacaagaggaggttcaacaagagctctactcgccactttttctcattgttgctgctctagtatttttaatactttgcttcaccattaagagaaagacagaatgaatgagctcactttaattgacttctatttgtgctttttagcctttctgctattccttgttttaataatgcttattatattttggttttcactcgaaatccaggatctagaagaaccttgtaccaaagtctaaacgaacatgaaacttctcattgttttgacttgtatttctctatgcagttgcatatgcactgtagtacagcgctgtgcatctaataaacctcatgtgcttgaagatccttgtaaggtacaacactaggggtaatacttatagcactgcttggctttgtgctctaggaaaggttttaccttttcatagatggcacactatggttcaaacatgcacacctaatgttactatcaactgtcaagatccagctggtggtgcgcttatagctaggtgttggtaccttcatgaaggtcaccaaactgctgcatttagagacgtacttgttgttttaaataaacgaacaaattaaaatgtctgataatggaccccaatcaaaccaacgtagtgccccccgcattacatttggtggacccacagattcaactgacaataaccagaatggaggacgcaatggggcaaggccaaaacagcgccgaccccaaggtttacccaataatactgcgtcttggttcacagctctcactcagcatggcaaggaggaacttagattccctcgaggccagggcgttccaatcaacaccaatagtggtccagatgaccaaattggctactaccgaagagctacccgacgagttcgtggtggtgacggcaaaatgaaagagctcagccccagatggtacttctattacctaggaactggcccagaagcttcacttccctacggcgctaacaaagaaggcatcgtatgggttgcaactgagggagccttgaatacacccaaagaccacattggcacccgcaatcctaataacaatgctgccaccgtgctacaacttcctcaaggaacaacattgccaaaaggcttctacgcagagggaagcagaggcggcagtcaagcctcttctcgctcctcatcacgtagtcgcggtaattcaagaaattcaactcctggcagcagtaggggaaattctcctgctcgaatggctagcggaggtggtgaaactgccctcgcgctattgctgctagacagattgaaccagcttgagagcaaagtttctggtaaaggccaacaacaacaaggccaaactgtcactaagaaatctgctgctgaggcatctaaaaagcctcgccaaaaacgtactgccacaaaacagtacaacgtcactcaagcatttgggagacgtggtccagaacaaacccaaggaaatttcggggaccaagacctaatcagacaaggaactgattacaaacattggccgcaaattgcacaatttgctccaagtgcctctgcattctttggaatgtcacgcattggcatggaagtcacaccttcgggaacatggctgacttatcatggagccattaaattggatgacaaagatccacaattcaaagacaacgtcatactgctgaacaagcacattgacgcatacaaaacattcccaccaacagagcctaaaaaggacaaaaagaaaaagactgatgaagctcagcctttgccgcagagacaaaagaagcagcccactgtgactcttcttcctgcggctgacatggatgatttctccagacaacttcaaaattccatgagtggagcttctgctgattcaactcaggcataaacactcatgatgaccacacaaggcagatgggctatgtaaacgttttcgcaattccgtttacgatacatagtctactcttgtgcagaatgaattctcgtaactaaacagcacaagtaggtttagttaactttaatctcacatagcaatctttaatcaatgtgtaacattagggaggacttgaaagagccaccacattttcatcgaggccacgcggagtacgatcgagggtacagtgaataatgctagggagagctgcctatatggaagagccctaatgtgtaaaattaattttagtagtgctatccccatgtgattttaatagcttcttaggaga

SEQ ID NO: 15 - DNA, 29715 bp, SARS coronavirus
cctacccaggaaaagccaaccaacctcgatctcttgtagatctgttctctaaacgaactttaaaatctgtgtagctgtcgctcggctgcatgcctagtgcacctacgcagtataaacaataataaattttactgtcgttgacaagaaacgagtaactcgtccctcttctgcagactgcttacggtttcgtccgtgttgcagtcgatcatcagcatacctaggtttcgtccgggtgtgaccgaaaggtaagatggagagccttgttcttggtgtcaacgagaaaacacacgtccaactcagtttgcctgtccttcaggttagagacgtgctagtgcgtggcttcggggactctgtggaagaggccctatcggaggcacgtgaacacctcaaaaatggcacttgtggtctagtagagctggaaaaaggcgtactgccccagcttgaacagccctatgtgtgcattaaacgttctgatgcctaaagcacctatcacggccacaaggtcgttgagctggttgcagaaatggacggcattcagtacggtcgtagcggtataacactgggagtactcgtgccacatgtgggcgaaaccccaattgcataccgcaatgttcttcttcgtaagaacggtaataagggagccggtggtcatagctatggcatcgatctaaagtcttatgacttaggtgacgagcttggcactgatcccattgaagattatgaacaaaactggaacactaagcatggcagtggtgcactccgtgaactcactcgtgagctcaatggaggtgcagtcactcgctatgtcgacaacaatttctgtggcccagatgggtaccctcttgattgcatcaaagattttctcgcacgcgcgggcaagtcaatgtgcactctttccgaacaacttgattacatcgagtcgaagagaggtgtctactgctgccgtgaccatgagcatgaaattgcctggttcactgagcgctctgataagagctacgagcaccagacacccttcgaaattaagagtgccaagaaatttgacactttcaaaggggaatgcccaaagtttgtgtttcctcttaactcaaaagtcaaagtcattcaaccacgtgttgaaaagaaaaagactgagggtttcatggggcgtatacgctctgtgtaccctgttgcatctccacaggagtgtaacaatatgcacttgtctaccttgatgaaatgtaatcattgcgatgaagtttcatggcagacgtgcgactttctgaaagccacttgtgaacattgtggcactgaaaatttagttattgaaggacctactacatgtgggtacctacctactaatgctgtagtgaaaatgccatgtcctgcctgtmaagacccagagattggacctgagcatagtgttgcagattatcacaaccactcaaacattgaaactcgactccgcaagggaggtaggactagatgttttggaggctgtgtgtttgcctatgttggctgctataataagcgtgcctactgggttcctcgtgctagtgctgatattggctcaggccatactggcattactggtgacaatgtggagaccttgaatgaggatctccttgagatactgagtcgtgaacgtgttaacattaacattgttggcgattttcatttgaatgaagaggttgccatcattttggcatctttctctgcttctacaagtgcctttattgacactataaagagtcttgattacaagtctttcaaaaccattgttgagtcctgcggtaactataaagttaccaagggaaagcccgtaaaaggtgcttggaacattggacaacagagatcagttttaacaccactgtgtggttttccctcacaggctgctggtgttatcagatcaatttttgcgcgcacacttgatgcagcaaaccactcaattcctgatttgcaaagagcagctgtcaccatacttgatggtatttctgaacagtcattacgtcttgtcgacgccatggtttatacttcagacctgctcaccaacagtgtcattattatggcatatgtaactggtggtcttgtacaacagacttctcagtggttgtctaatcttttgggcactactgttgaaaaactcaggcctatctttgaatggattgaggcgaaacttagtgcaggagttgaatttctcaaggatgcttgggagattctcaaatttctcattacaggtgtttttgacatcgtcaagggtcaaatacaggttgcttcagataacatcaaggattgtgtaaaatgcttcattgatgttgttaacaaggcactcgaaatgtgcattgatcaagtcactatcgctggcgcaaagttgcgatcactcaacttaggtgaagtcttcatcgctcaaagcaagggactttaccgtcagtgtatacgtggcaaggagcagctgcaactactcatgcctcttaaggcaccaaaagaagtaacctttcttgaaggtgattcacatgacacagtacttacctctgaggaggttgttctcaagaacggtgaactcgaagcactcgagacgcccgttgatagcttcacaaatggagctatcgttggcacaccagtctgtgtaaatggcctcatgctcttagagattaaggacaaagaacaatactgcgcattgtctcctggtttactggctacaaacaatgtctttcgcttaaaagggggtgcaccaattaaaggtgtaacctttggagaagatactgtttgggaagttcaaggttacaagaatgtgagaatcacatttgagcttgatgaacgtgttgacaaagtgcttaatgaaaagtgctctgtctacactgttgaatccggtaccgaagttactgagtttgcatgtgttgtagcagaggctgttgtgaagactttacaaccagtttctgatctccttaccaacatgggtattgatcttgatgagtggagtgtagctacattctacttatttgatgatgctggtgaagaaaacttttcatcacgtatgtattgttccttttaccctccagatgaggaagaagaggacgatgcagagtgtgaggaagaagaaattgatgaaacctgtgaacatgagtacggtacagaggatgattatcaaggtctccctctggaatttggtgcctcagctgaaacagttcgagttgaggaagaagaagaggaagactggctggatgatactactgagcaatcagagattgagccagaaccagaacctacacctgaagaaccagttaatcagtttactggttatttaaaacttactgacaatgttgccattaaatgtgttgacatcgttaaggaggcacaaagtgctaatcctatggtgattgtaaatgctgctaacatacacctgaaacatggtggtggtgtagcaggtgcactcaacaaggcaaccaatggtgccatgcaaaaggagagtgatgattacattaagctaaatggccctcttacagtaggagggtcttgtttgctttctggacataatcttgctaagaagtgtctgcatgttgttggacctaacctaaatgcaggtgaggacatccagcttcttaaggcagcatatgaaaatttcaattcacaggacatcttacttgcaccattgttgtcagcaggcatatttggtgctaaaccacttcagtctttacaagtgtgcgtgcagacggttcgtacacaggtttatattgcagtcaatgacaaagctctttatgagcaggttgtcatggattatcttgataacctgaagcctagagtggaagcacctaaacaagaggagccaccaaacacagaagattccaaaactgaggagaaatctgtcgtacagaagcctgtcgatgtgaagccaaaaattaaggcctgcattgatgaggttaccacaacactggaagaaactaagtttcttaccaataagttactcttgtttgctgatatcaatggtaagctttaccatgattctcagaacatgcttagaggtgaagatatgtctttccttgagaaggatgcaccttacatggtaggtgatgttatcactagtggtgatatcacttgtgttgtaataccctccaaaaaggctggtggcactactgagatgctctcaagagctttgaagaaagtgccagttgatgagtatataaccacgtaccctggacaaggatgtgctggttatacacttgaggaagctaagactgctcttaagaaatgcaaatctgcattttatgtactaccttcagaagcacctaatgctaaggaagagattctaggaactgtatcctggaatttgagagaaatgcttgctcatgctgaagagacaagaaaattaatgcctatatgcatggatgttagagccataatggcaaccatccaacgtaagtataaaggaattaaaattcaagagggcatcgttgactatggtgtccgattcttcttttatactagtaaagagcctgtagcttctattattacgaagctgaactctctaaatgagccgcttgtcacaatgccaattggttatgtgacacatggttttaatcttgaagaggctgcgcgctgtatgcgttctcttaaagctcctgccgtagtgtcagtatcatcaccagatgctgttactacatataatggatacctcacttcgtcatcaaagacatctgaggagcactttgtagaaacagtttctttggctggctcttacagagattggtcctattcaggacagcgtacagagttaggtgttgaatttcttaagcgtggtgacaaaattgtgtaccacactctggagagccccgtcgagtttcatcttgacggtgaggttctttcacttgacaaactaaagagtctcttatccctgcgggaggttaagactataaaagtgttcacaactgtggacaacactaatctccacacacagcttgtggatatgtctatgacatatggacagcagtttggtccaacatacttggatggtgctgatgttacaaaaattaaacctcatgtaaatcatgagggtaagactttctttgtactacctagtgatgacacactacgtagtgaagctttcgagtactaccatactcttgatgagagttttcttggtaggtacatgtctgctttaaaccacacaaagaaatggaaatttcctcaagttggtggtttaacttcaattaaatgggctgataacaattgttatttgtctagtgttttattagcacttcaacagcttgaagtcaaattcaatgcaccagcacttcaagaggcttattatagagcccgtgctggtgatgctgctaacttttgtgcactcatactcgcttacagtaataaaactgttggcgagcttggtgatgtcagagaaactatgacccatcttctacagcatgctaatttggaatctgcaaagcgagttcttaatgtggtgtgtaaacattgtggtcagaaaactactaccttaacgggtgtagaagctgtgatgtatatgggtactctatcttatgataatcttaagacaggtgtttccattccatgtgtgtgtggtcgtgatgctacacaatatctagtacaacaagagtcttcttttgttatgatgtctgcaccacctgctgagtataaattacagcaaggtacattcttatgtgcgaatgagtacactggtaactatcagtgtggtcattacactcatataactgctaaggagaccctctatcgtattgacggagctcaccttacaaagatgtcagagtacaaaggaccagtgactgatgttttctacaaggaaacatcttacactacaaccatcaagcctgtgtcgtataaactcgatggagttacttacacagagattgaaccaaaattggatgggtattataaaaaggataatgcttactatacagagcagcctatagaccttgtaccaactcaaccattaccaaatgcgagttttgataatttcaaactcacatgttctaacacaaaatttgctgatgatttaaatcaaatgacaggcttcacaaagccagcttcacgagagctatctgtcacattcttcccagacttgaatggcgatgtagtggctattgactatagacactattcagcgagtttcaagaaaggtgctaaattactgcataagccaattgtttggcacattaaccaggctacaaccaagacaacgttcaaaccaaacacttggtgtttacgttgtctttggagtacaaagccagtagatacttcaaattcatttgaagttctggcagtagaagacacacaaggaatggacaatcttgcttgtgaaagtcaacaacccacctctgaagaagtagtggaaaatcctaccatacagaaggaagtcatagagtgtgacgtgaaaactaccgaagttgtaggcaatgtcatacttaaaccatcagatgaaggtgttaaagtaacacaagagttaggtcatgaggatcttatggctgcttatgtggaaaacacaagcattaccattaagaaacctaatgagctttcactagccttaggtttaaaaacaattgccactcatggtattgctgcaattaatagtgttccttggagtaaaattttggcttatgtcaaaccattcttaggacaagcagcaattacaacatcaaattgcgctaagagattagcacaacgtgtgtttaacaattatatgccttatgtgtttacattattgttccaattgtgtacttttactaaaagtaccaattctagaattagagcttcactacctacaactattgctaaaaatagtgttaagagtgttgctaaattatgtttggatgccggcattaattatgtgaagtcacccaaattttctaaattgttcacaatcgctatgtggctattgttgttaagtatttgcttaggttctctaatctgtgtaactgctgcttttggtgtactcttatctaattttggtgctccttcttattgtaatggcgttagagaattgtatcttaattcgtctaacgttactactatggatttctgtgaaggttcttttccttgcagcatttgtttaagtggattagactcccttgattcttatccagctcttgaaaccattcaggtgacgatttcatcgtacaagctagacttgacaattttaggtctggccgctgagtgggttttggcatatatgttgttcacaaaattcttttatttattaggtctttcagctataatgcaggtgttctttggctattttgctagtcatttcatcagcaattcttggctcatgtggtttatcattagtattgtacaaatggcacccgtttctgcaatggttaggatgtacatcttctttgcttctttctactacatatggaagagctatgttcatatcatggatggttgcacctcttcgacttgcatgatgtgctataagcgcaatcgtgccacacgcgttgagtgtacaactattgttaatggcatgaagagatctttctatgtctatgcaaatggaggccgtggcttctgcaagactcacaattggaattgtctcaattgtgacacattttgcactggtagtacattcattagtgatgaagttgctcgtgatttgtcactccagtttaaaagaccaatcaaccatactgaccagtcatcgtatatagttgatagtgttgctgtgaaaaatggcgcgcttcacatctactttgacaaggctggtcaaaagacatatgagagacatccgctctcccattttgtcaatttagacaatttgagagctaacaacactaaaggttcactgcctattaatgtcatagtttttgatggcaagtccaaatgcgacgagtctgcttctaagtctgcttctgtgtactacagtcagctgatgtgccaacctattctgttgcttgaccaagctcttgtatcagacgttggagatagtactgaagtttccgttaagatgtttgatgcttatgtcgacaccttttcagcaacttttagtgttcctatggaaaaacttaaggcacttgttgctacagctcacagcgagttagcaaagggtgtagctttagatggtgtcctttctacattcgtgtcagctgcccgacaaggtgttgttgataccgatgttgacacaaaggatgttattgaatgtctcaaactttcacatcactctgacttagaagtgacaggtgacagttgtaacaatttcatgctcacctataataaggttgaaaacatgacgcccagagatcttggcgcatgtattgactgtaatgcaaggcatatcaatgcccaagtagcaaaaagtcacaatgtttcactcatctggaatgtaaaagactacatgtctttatctgaacagctgcgtaaacaaattcgtagtgctgccaagaagaacaacataccttttagactaacttgtgctacaactagacaggttgtcaatgtcataactactaaaatctcactcaagggtggtaagattgttagtacttgttttaaacttatgcttaaggccacattattgtgcgttcttgctgcattggtttgttatatacgttatgccagtacatacattgtcaatccatgatggttacacaaatgaaatcattggttacaaagccattcaggatggtgtcactcgtgacatcatttctactgatgattgttttgcaaataaacatgctggttttgacgcatggtttagccagcgtggtggttcatacaaaaatgacaaaagctgccctgtagtagctgctatcattacaagagagattggtttcatagtgcctggcttaccgggtactgtgctgagagcaatcaatggtgacttcttgcattttctacctcgtgtttttagtgctgttggcaacatttgctacacaccttccaaactcattgagtatagtgattttgctacctctgcttgcgttcttgctgctgagtgtacaatttttaaggatgctatgggcaaacctgtgccatattgttatgacactaatttgctagagggttctatttcttatagtgagcttcgtccagacactcgttatgtgcttatggatggttccatcatacagtttcctaacacttacctggagggttctgttagagtagtaacaacttttgatgctgagtactgtagacatggtacatgcgaaaggtcagaagtaggtatttgcctatctaccagtggtagatgggttcttaataatgagcattacagagctctatcaggagttttctgtggtgttgatgcgatgaatctcatagctaacatctttactcctcttgtgcaacctgtgggtgctttagatgtgtctgctctagtagtggctggtggtattattgccatattggtgacttgtgctgcctactactttatgaaattcagacgtgtttttggtgagtacaaccatgttgttgctgctaatgcacttttgtttttgatgtctttcactatactctgtctggtaccagcttacagctttctgccgggagtctactcagtcttttacttgtacttgacattctatttcaccaatgatgtttcattcttggctcaccttcaatggtttgccatgttttctcctattgtgcctttttggataacagcaatctatgtattctgtatttctctgaagcactgccattggttctttaacaactatcttaggaaaagagtcatgtttaatggagttacatttagtaccttcgaggaggctgctttgtgtacctttttgctcaacaaggaaatgtacctaaaattgcgtagcgagacactgttgccacttacacagtataacaggtatcttgctctatataacaagtacaagtatttcagtggagccttagatactaccagctatcgtgaagcagcttgctgccacttagcaaaggctctaaatgactttagcaactcaggtgctgatgttctctaccaaccaccacagacatcaatcacttctgctgttctgcagagtggttttaggaaaatggcattcccgtcaggcaaagttgaagggtgcatggtacaagtaacctgtggaactacaactcttaatggattgtggttggatgacacagtatactgtccaagacatgtcatttgcacagcagaagacatgcttaatcctaactatgaagatctgctcattcgcaaatccaaccatagctttcttgttcaggctggcaatgttcaacttcgtgttattggccattctatgcaaaattgtctgcttaggcttaaagttgatacttctaaccctaagacacccaagtataaatttgtccgtatccaacctggtcaaacattttcagttctagcatgctacaatggttcaccatctggtgtttatcagtgtgccatgagacctaatcataccattaaaggttctttccttaatggatcatgtggtagtgttggttttaacattgattatgattgcgtgtctttctgctatatgcatcatatggagcttccaacaggagtacacgctggtactgacttagaaggtaaattctatggtccatttgttgacagacaaactgcacaggctgcaggtacagacacaaccataacattaaatgttttggcatggctgtatgctgctgttatcaatggtgataggtggtttcttaatagattcaccactactttgaatgactttaaccttgtggcaatgaagtacaactatgaacctttgacacaagatcatgttgacatattgggacctctttctgctcaaacaggaattgccgtcttagatatgtgtgctgctttgaaagagctgctgcagaatggtatgaatggtcgtactatccttggtagcactattttagaagatgagtttacaccatttgatgttgttagacaatgctctggtgttaccttccaaggtaagttcaagaaaattgttaagggcactcatcattggatgcttttaactttcttgacatcactattgattcttgttcaaagtacacagtggtcactgtttttctttgtttacgagaatgctttcttgccatttactcttggtattatggcaattgctgcatgtgctatgctgcttgttaagcataagcacgcattcttgtgcttgtttctgttaccttctcttgcaacagttgcttactttaatatggtctacatgcctgctagctgggtgatgcgtatcatgacatggcttgaattggctgacactagcttgtctggttataggcttaaggattgtgttatgtatgcttcagctttagttttgcttattctcatgacagctcgcactgtttatgatgatgctgctagacgtgtttggacactgatgaatgtcattacacttgtttacaaagtctactatggtaatgctttagatcaagctatttccatgtgggccttagttatttctgtaacctctaactattctggtgtcgttacgactatcatgtttttagctagagctatagtgtttgtgtgtgttgagtataacccattgttatttattactggcaacaccttacagtgtatcatgcttgtttattgtttcttaggctattgttgctgctgctactttggccttttctgtttactcaaccgttacttcaggcttactcttggtgtttatgactacttggtctctacacaagaatttaggtatatgaactcccaggggcttttgcctcctaagagtagtattgatgctttcaagcttaacattaagttgttgggtattggaggtaaaccatgtatcaaggttgctactgtacagtctaaaatgtctgacgtaaagtgcacatctgtggtactgctctcggttcttcaacaacttagagtagagtcatcttctaaattgtgggcacaatgtgtacaactccacaatgatattcttcttgcaaaagacacaactgaagctttcgagaagatggtttctcttttgtctgttttgctatccatgcagggtgctgtagacattaataggttgtgcgaggaaatgctcgataaccgtgctactcttcaggctattgcttcagaatttagttctttaccatcatatgccgcttatgccactgcccaggaggcctatgagcaggctgtagctaatggtgattctgaagtcgttctcaaaaagttaaagaaatctttgaatgtggctaaatctgagtttgaccgtgatgctgccatgcaacgcaagttggaaaagatggcagatcaggctatgacccaaatgtacaaacaggcaagatctgaggacaagagggcaaaagtaactagtgctatgcaaacaatgctcttcactatgcttaggaagcttgataatgatgcacttaacaacattatcaacaatgcgcgtgatggttgtgttccactcaacatcataccattgactacagcagccaaactcatggttgttgtccctgattatggtacctacaagaacacttgtgatggtaacacctttacatatgcatctgcactctgggaaatccagcaagttgttgatgcggatagcaagcatgttcaacttagtgaaattaacatggacaattcaccaaatttggcttggcctcttattgttacagctctaagagccaactcagctgttaaactacagaataatgaactgagtccagtagcactacgacagatgtcctgtgcggctggtaccacacaaacagcttgtactgatgacaatgcacttgcctactataacaattcgaagggaggtaggtttgtgctggcattactatcagaccaccaagatctcaaatgggctagattccctaagagtgatggtacaggtacaatttacacagaactggaaccaccttgtaggtttgttacagacacaccaaaagggcctaaagtgaaatacttgtacttcatcaaaggcttaaacaacctaaatagaggtatggtgctgggcagtttagctgctacagtacgtcttcaggctggaaatgctacagaagtacctgcccattcagactgtgatttccttctgtgcttttgcagtagaccctggtcaagcatataaggattacctagcaagtggaggacaaccaatcaccaactgtgtgaagatgttgtgtacacacactggtacaggacaggcaattactgtaacaccagaagctaacatggaccaagagtcctttggtggtgcttcatgttgtctgtattgtagatgccacattgaccatccaaatcctaaaggattctgtgacttgaaaggtaagtacgtccaaatacctaccacttgtgctaatgacccagtgggttttacacttagaaacacagtctgtaccgtctgcggaatgtggaaaggttatggctgtagttgtgaccaactccgcgaacccttgatgcagtctgcggatgcatctaacgtttttaaacgggtttgcggtgtaagtgcagcccgtcttacaccgtgcggcacaggcactagtactgatgtctgtctacagggcattttgatatttacaacgaaaaagttgctggttttgcaaagttcctaaaaactaattgctgtcgcttccaggagaaggatgaggaaggcaatttattagactcttactttgtagttaagaggcatactatgtctaactaccaacatgaagagactatttataacttggttaaagattgtccagcggttgctgtccatgactttttcaagtttagagtagatggtgacatggtaccacatatatcacgtcagcgtctaactaaatacacaatggctgatttagtctatgctctacgtcattttgatgagggtaattgtgatacattaaaagaaatactcgtcacatacaattgctgtgatgatgattatttcaataagaaggattggtatgacttcgtagagaatcctgacatcttacgcgtatatgctaacttaggtgagcgtgtacgccaatcattattaaagactgtacaattctgcgatgctatgcgtgatgcaggcattgtaggcgtactgacattagataatcaggatcttaatgggaactggtacgatttcggtgatttcgaacaagtagcaccaggctgcggagttcctattgtggattcatattactcattgctgatgcccatcctcactttgactagggcattggctgctgagtcccatatggatgctgatctcgcaaaaccacttattaagtgggatttgctgaaatatgattttacggaagagagactttgtctcttcgaccgttattttaaatattgggaccagacataccatcccaattgtattaactgtttggatgataggtgtatccttcattgtgcaaactttaatgtgttattttctactgtgtttccacctacaagttttggaccactagtaagaaaaatatttgtagatggtgttccttttgttgtttcaactggataccattttcgtgagttaggagtcgtacataatcaggatgtaaacttacatagctcgcgtctcagtttcaaggaacttttagtgtatgctgctgatccagctatgcatgcagcttctggcaatttattgctagataaacgcactacatgcttttcagtagctgcactaacaaacaatgttgcttttcaaactgtcaaacccggtaattttaataaagacttttatgactttgctgtgtctaaaggtttctttaaggaaggaagttctgttgaactaaaacacttcttctttgctcaggatggcaacgctgctatcagtgattatgactattatcgttataatctgccaacaatgtgtgatatcagacaactcctattcgtagttgaagttgttgataaatactttgattgttacgatggtggctgtattaatgccaaccaagtaatcgttaacaatctggataaatcagctggtttcccatttaataaatggggtaaggctagactttattatgactcaatgagttatgaggatcaagatgcacttttcgcgtatactaagcgtaatgtcatccctactataactctaatgaatcttaagtatgccattagtgcaaagaatagagctcgcaccgtagctggtgtctctatctgtagtactatgacaaatagacagtttcatcagaaattattgaagtcaatagccgccactagaggagctactgtggtaattggaacaagcaagttttacggtggctggcataatatgttaaaaactgtttacagtgatgtagaaactccacaccttatgggttgggattatccaaaatgtgacagagccatgcctaacatgcttaggataatggcctctcttgttcttgctcgcaaacataacacttgctgtaacttatcacaccgtttctacaggttagctaacgagtgtgcgcaagtattaagtgagatggtcatgtgtggcggctcactatatgttaaaccaggtggaacatcatccggtgatgctacaactgcttatgctaatagtgtctttaacatttgtcaagctgttacagccaatgtaaatgcacttctttcaactgatggtaataagatagctgacaagtatgtccgcatctacaacacaggctctatgagtgtctctatatgaaatagggatgttgatcatgaattcgtggatgagttttacgcttacctgcgtaaacatttctccatgatgattctttctgatgatgccgttgtgtgctataacagtaactatgcggctcaaggtttagtagctagcattaagaactttaaggcagttctttattatcaaaataatgtgttcatgtctgaggcaaaatgttggactgagactgaccttactaaaggacctcacgaattttgctcacagcatacaatgctagttaaacaaggagatgattacgtgtacctgccttacccagatccatcaagaatattaggcgcaggctgttttgtcgatgatattgtcaaaacagatggtacacttatgattgaaaggttcgtgtcactggctattgatgcttacccacttacaaaacatcctaatcaggagtatgctgatgtctttcacttgtatttacaatacattagaaagttacatgatgagcttactggccacatgttggacatgtattccgtaatgctaactaatgataacacctcacggtactgggaacctgagttttatgaggctatgtacacaccacatacagtcttgcaggctgtaggtgcttgtgtattgtgcaattcacagacttcacttcgttgcggtgcctgtattaggagaccattcctatgttgcaagtgctgctatgaccatgtcatttcaacatcacacaaattagtgttgtctgttaatccctatgtttgcaatgccccaggttgtgatgtcactgatgtgacacaactgtatctaggaggtatgagctattattgcaagtcacataagcctcccattagttttccattatgtgctaatggtcaggtttttggtttatacaaaaacacatgtgtaggcagtgacaatgtcactgacttcaatgcgatagcaacatgtgattggactaatgctggcgattacatacttgccaacacttgtactgagagactcaagcttttcgcagcagaaacgctcaaagccactgaggaaacatttaagctgtcatatggtattgccactgtacgcgaagtactctctgacagagaattgcatctttcatgggaggttggaaaacctagaccaccattgaacagaaactatgtctttactggttaccgtgtaactaaaaatagtaaagtacagattggagagtacacctttgaaaaaggtgactatggtgatgctgttgtgtacagaggtactacgacatacaagttgaatgttggtgattactttgtgttgacatctcacactgtaatgccacttagtgcacctactctagtgccacaagagcactatgtgagaattactggcttgtacccaacactcaacatctcagatgagttttctagcaatgttgcaaattatcaaaaggtcggcatgcaaaagtactctacactccaaggaccacctggtactggtaagagtcattttgccatcggacttgctctctattacccatctgctcgcatagtgtatacggcatgctctcatgcagctgttgatgccctatgtgaaaaggcattaaaatatttgcccatagataaatgtagtagaatcatacctgcgcgtgcgcgcgtagagtgttttgataaattcaaagtgaattcaacactagaacagtatgttttctgcactgtaaatgcattgccagaaacaactgctgacattgtagtctttgatgaaatctctatggctactaattatgacttgagtgttgtcaatgctagacttcgtgcaaaacactacgtctatattggcgatcctgctcaattaccagccccccgcacattgctgactaaaggcacactagaaccagaatattttaattcagtgtgcagacttatgaaaacaataggtccagacatgttccttggaacttgtcgctgttgtcctgctgaaattgttgacactgtgagtgctttagtatatgacaataagctaaaagcacacaaggataagtcagctcaatgcttcaaaatgttctacaaaggtgttattacacatgatgtttcatctgcaatcaacagacctcaaataggcgttgtaagagaatttcttacacgcaatcctgcttggagaaaagctgtttttatctcaccttataattcacagaacgctgtagcttcaaaaatcttaggattgcctacgcagactgttgattcatcacagggttctgaatatgactatgtcatattcacacaaactactgaaacagcacactcttgtaatgtcaaccgcttcaatgtggctatcacaagggcaaaaattggcattttgtgcataatgtctgatagagatctttatgacaaactgcaatttacaagtctagaaataccacgtcgcaatgtggctacattacaagcagaaaatgtaactggactttttaaggactgtagtaagatcattactggtcttcatcctacacaggcacctacacacctcagcgttgatataaagttcaagactgaaggattatgtgttgacataccaggcataccaaaggacatgacctaccgtagactcatctctatgatgggtttcaaaatgaattaccaagtcaatggttaccctaatatgtttatcacccgcgaagaagctattcgtcacgttcgtgcgtggattggctttgatgtagagggctgtcatgcaactagagatgctgtgggtactaacctacctctccagctaggattttctacaggtgttaacttagtagctgtaccgactggttatgttgacactgaaaataacacagaattcaccagagttaatgcaaaacctccaccaggtgaccagtttaaacatcttataccactcatgtataaaggcttgccctggaatgtagtgcgtattaagatagtacaaatgctcagtgatacactgaaaggattgtcagacagagtcgtgttcgtcctttgggcgcatggctttgagcttacatcaatgaagtactttgtcaagattggacctgaaagaacgtgttgtctgtgtgacaaacgtgcaacttgcttttctacttcatcagatacttatgcctgctggaatcattctgtgggttttgactatgtctataacccatttatgattgatgttcagcagtggggctttacgggtaaccttcagagtaaccatgaccaacattgccaggtacatggaaatgcacatgtggctagttgtgatgctatcatgactagatgtttagcagtccatgagtgctttgttaagcgcgttgattggtctgttgaataccctattataggagatgaactgagggttaattctgcttgcagaaaagtacaacacatggttgtgaagtctgcattgcttgctgataagtttccagttcttcatgacattggaaatccaaaggctatcaagtgtgtgcctcaggctgaagtagaatggaagttctacgatgctcagccatgtagtgacaaagcttacaaaatagaggaactcttctattcttatgctacacatcacgataaattcactgatggtgtttgtttgttttggaattgtaacgttgatcgttacccagccaatgcaattgtgtgtaggtttgacacaagagtcttgtcaaacttgaacttaccaggctgtgatggtggtagtttgtatgtgaataagcatgcattccacactccagctttcgataaaagtgcatttactaatttaaagcaattgcctttcttttactattctgatagtccttgtgagtctcatggcaaacaagtagtgtcggatattgattatgttccactcaaatctgctacgtgtattacacgatgcaatttaggtggtgctgtttgcagacaccatgcaaatgagtaccgacagtacttggatgcatataatatgatgatttctgctggatttagcctatggatttacaaacaatttgatacttataacctgtggaatacatttaccaggttacagagtttagaaaatgtggcttataatgttgttaataaaggacactttgatggacacgccggcgaagcacctgtttccatcattaataatgctgtttacacaaaggtagatggtattgatgtggagatctttgaaaataagacaacacttcctgttaatgttgcatttgagctttgggctaagcgtaacattaaaccagtgccagagattaagatactcaataatttgggtgttgatatcgctgctaatactgtaatctgggactacaaaagagaagccccagcacatgtatctacaataggtgtctgcacaatgactgacattgccaagaaacctactgagagtgcttgttcttcacttactgtcttgtttgatggtagagtggaaggacaggtagacctttttagaaacgcccgtaatggtgttttaataacagaaggttcagtcaaaggtctaacaccttcaaagggaccagcacaagctagcgtcaatggagtcacattaattggagaatcagtaaaaacacagtttaactactttaagaaagtagacggcattattcaacagttgcctgaaacctactttactcagagcagagacttagaggattttaagcccagatcacaaatggaaactgactttctcgagctcgctatggatgaattcatacagcgatataagctcgagggctatgccttcgaacacatcgtttatggagatttcagtcatggacaacttggcggtcttcatttaatgataggcttagccaagcgctcacaagattcaccacttaaattagaggattttatccctatggacagcacagtgaaaaattacttcataacagatgcgcaaacaggttcatcaaaatgtgtgtgttctgtgattgatcttttacttgatgactttgtcgagataataaagtcacaagatttgtcagtgatttcaaaagtggtcaaggttacaattgactatgctgaaatttcattcatgctttggtgtaaggatggacatgttgaaaccttctacccaaaactacaagcaagtcaagcgtggcaaccaggtgttgcgatgcctaacttgtacaagatgcaaagaatgcttcttgaaaagtgtgaccttcagaattatggtgaaaatgctgttataccaaaaggaataatgatgaatgtcgcaaagtatactcaactgtgtcaatacttaaatacacttactttagctgtaccctacaacatgagagttattcactttggtgctggctctgataaaggagttgcaccaggtacagctgtgctcagacaatggttgccaactggcacactacttgtcgattcagatcttaatgacttcgtctccgacgcagattctactttaattggagactgtgcaacagtacatacggctaataaatgggaccttattattagcgatatgtatgaccctaggaccaaacatgtgacaaaagagaatgactctaaagaagggtttttcacttatctgtgtggatttataaagcaaaaactagccctgggtggttctatagctgtaaagataacagagcattcttggaatgctgacctttacaagcttatgggccatttctcatggtggacagcttttgttacaaatgtaaatgcatcatcatcggaagcatttttaattggggctaactatcttggcaagccgaaggaacaaattgatggctataccatgcatgctaactacattttctggaggaacacaaatcctatccagttgtcttcctattcactctttgacatgagcaaatttcctcttaaattaagaggaactgctgtaatgtctcttaaggagaatcaaatcaatgatatgatttattctcttctggaaaaaggtaggcttatcattagagaaaacaacagagttgtggtttcaagtgatattcttgttaacaactaaacgaacatgtttattttcttattatttcttactctcactagtggtagtgaccttgaccggtgcaccacttttgatgatgttcaagctcctaattacactcaacatacttcatctatgaggggggtttactatcctgatgaaatttttagatcagacactctttatttaactcaggatttatttcttccattttattctaatgttacagggtttcatactattaatcatacgtttggcaaccctgtcataccttttaaggatggtatttattttgctgccacagagaaatcaaatgttgtccgtggttgggtttttggttctaccatgaacaacaagtcacagtcggtgattattattaacaattctactaatgttgttatacgagcatgtaactttgaattgtgtgacaaccctttctttgctgtttctaaacccatgggtacacagacacatactatgatattcgataatgcatttaattgcactttcgagtacatatctgatgccttttcgcttgatgtttcagaaaagtcaggtaattttaaacacttacgagagtttgtgtttaaaaataaagatgggtttctctatgtttataagggctatcaacctatagatgtagttcgtgatctaccttctggttttaacactttgaaacctatttttaagttgcctcttggtattaacattacaaattttagagccattcttacagccttttcacctgctcaagacatttggggcacgtcagctgcagcctattttgttggctatttaaagccaactacatttatgctcaagtatgatgaaaatggtacaatcacagatgctgttgattgttctcaaaatccacttgctgaactcaaatgctctgttaagagctttgagattgacaaaggaatttaccagacctctaatttcagggttgttccctcaggagatgttgtgagattccctaatattacaaacttgtgtccttttggagaggtttttaatgctactaaattcccttctgtctatgcatgggagagaaaaaaaatttctaattgtgttgctgattactctgtgctctacaactcaacatttttttcaacctttaagtgttatggcgtttctgccactaagttgaatgatctttgcttctccaatgtctatgcagattcttttgtagtcaagggagatgatgtaagacaaatagcgccaggacaaactggtgttattgctgattataattataaattgccagatgatttcatgggttgtgtccttgcttggaatactaggaacattgatgctacttcaactggtaattataattataaatataggtatcttagacatggcaagcttaggccctttgagagagacatatctaatgtgcctttctcccctgatggcaaaccttgcaccccacctgctcttaattgttattggccattaaatgattatggtttttacaccactactggcattggctaccaaccttacagagttgtagtactttcttttgaacttttaaatgcaccggccacggtttgtggaccaaaattatccactgaccttattaagaaccagtgtgtcaattttaattttaatggactcactggtactggtgtgttaactccttcttcaaagagatttcaaccatttcaacaatttggccgtgatgtttctgatttcactgattccgttcgagatcctaaaacatctgaaatattagacatttcaccttgctcttttgggggtgtaagtgtaattacacctggaacaaatgcttcatctgaagttgctgttctatatcaagatgttaactgcactgatgtttctacagcaattcatgcagatcaactcacaccagcttggcgcatatattctactggaaacaatgtattccagactcaagcaggctgtcttataggagctgagcatgtcgacacttcttatgagtgcgacattcctattggagctggcatttgtgctagttaccatacagtttctttattacgtagtactagccaaaaatctattgtggcttatactatgtctttaggtgctgatagttcaattgcttactctaataacaccattgctatacctactaacttttcaattagcattactacagaagtaatgcctgtttctatggctaaaacctccgtagattgtaatatgtacatctgcggagattctactgaatgtgctaatttgcttctccaatatggtagcttttgcacacaactaaatcgtgcactctcaggtattgctgctgaacaggatcgcaacacacgtgaagtgttcgctcaagtcaaacaaatgtacaaaaccccaactttgaaatattttggtggttttaatttttcacaaatattacctgaccctctaaagccaactaagaggtcttttattgaggacttgctctttaataaggtgacactcgctgatgctggcttcatgaagcaatatggcgaatgcctaggtgatattaatgctagagatctcatttgtgcgcagaagttcaatggacttacagtgttgccacctctgctcactgatgatatgattgctgcctacactgctgctctagttagtggtactgccactgctggatggacatttggtgctggcgctgctcttcaaataccttttgctatgcaaatggcatataggttcaatggcattggagttacccaaaatgttctctatgagaaccaaaaacaaatcgccaaccaatttaacaaggcgattagtcaaattcaagaatcacttacaacaacatcaactgcattgggcaagctgcaagacgttgttaaccagaatgctcaagcattaaacacacttgttaaacaacttagctctaattttggtgcaatttcaagtgtgctaaatgatatcctttcgcgacttgataaagtcgaggcggaggtacaaattgacaggttaattacaggcagacttcaaagccttcaaacctatgtaacacaacaactaatcagggctgctgaaatcagggcttctgctaatcttgctgctactaaaatgtctgagtgtgttcttggacaatcaaaaagagttgacttttgtggaaagggctaccaccttatgtccttcccacaagcagccccgcatggtgttgtcttcctacatgtcacgtatgtgccatcccaggagaggaacttcaccacagcgccagcaatttgtcatgaaggcaaagcatacttccctcgtgaaggtgtttttgtgtttaatggcacttcttggtttattacacagaggaacttcttttctccacaaataattactacagacaatacatttgtctcaggaaattgtgatgtcgttattggcatcattaacaacacagtttatgatcctctgcaacctgagcttgactcattcaaagaagagctggacaagtacttcaaaaatcatacatcaccagatgttgatcttggcgacatttcaggcattaacgcttctgtcgtcaacattcaaaaagaaattgaccgcctcaatgaggtcgctaaaaatttaaatgaatcactcattgaccttcaagaattgggaaaatatgagcaatatattaaatggccttggtatgtttggctcggcttcattgctggactaattgccatcgtcatggttacaatcttgctttgttgcatgactagttgttgcagttgcctcaagggtgcatgctcttgtggttcttgctgcaagtttgatgaggatgactctgagccagttctcaagggtgtcaaattacattacacataaacgaacttatggatttgtttatgagattttttactcttggatcaattactgcacagccagtaaaaattgacaatgcttctcctgcaagtactgttcatgctacagcaacgataccgctacaagcctcactccctttcggatggcttgttattggcgttgcatttcttgctgtttttcagagcgctaccaaaataattgcgctcaataaaagatggcagctagccctttataagggcttccagttcatttgcaatttactgctgctatttgttaccatctattcacatcttttgcttgtcgctgcaggtatggaggcgcaatttttgtacctctatgccttgatatattttctacaatgcatcaacgcatgtagaattattatgagatgttggctttgttggaagtgcaaatccaagaacccattactttatgatgccaactactttgtttgctggcacacacataactatgactactgtataccatataacagtgtcacagatacaattgtcgttactgaaggtgacggcatttcaacaccaaaactcaaagaagactaccaaattggtggttattctgaggataggcactcaggtgttaaagactatgtcgttgtacatggctatttcaccgaagtttactaccagcttgagtctacacaaattactacagacactggtattgaaaatgctacattcttcatctttaacaagcttgttaaagacccaccgaatgtgcaaatacacacaatcgacggctcttcaggagttgctaatccagcaatggatccaatttatgatgagccgacgacgactactagcgtgcctttgtaagcacaagaaagtgagtacgaacttatgtactcattcgtttcggaagaaacaggtacgttaatagttaatagcgtacttctttttcttgctttcgtggtattcttgctagtcacactagccatccttactgcgcttcgattgtgtgcgtactgctgcaatattgttaacgtgagtttagtaaaaccaacggtttacgtctactcgcgtgttaaaaatctgaactcttctgaaggagttcctgatcttctggtctaaacgaactaactattattattattctgtttggaactttaacattgcttatcatggcagacaacggtactattaccgttgaggagcttaaacaactcctggaacaatggaacctagtaataggtttcctattcctagcctggattatgttactacaatttgcctattctaatcggaacaggtttttgtacataataaagcttgttttcctctggctcttgtggccagtaacacttgcttgttttgtgcttgctgctgtctacagaattaattgggtgactggcgggattgcgattgcaatggcttgtattgtaggcttgatgtggcttagctacttcgttgcttccttcaggctgtttgctcgtacccgctcaatgtggtcattcaacccagaaacaaacattcttctcaatgtgcctctccgggggacaattgtgaccagaccgctcatggaaagtgaacttgtcattggtgctgtgatcattcgtggtcacttgcgaatggccggacactccctagggcgctgtgacattaaggacctgccaaaagagatcactgtggctacatcacgaacgctttcttattacaaattaggagcgtcgcagcgtgtaggcactgattcaggttttgctgcatacaaccgctaccgtattggaaactataaattaaatacagaccacgccggtagcaacgacaatattgctttgctagtacagtaagtgacaacagatgtttcatcttgttgacttccaggttacaatagcagagatattgattatcattatgaggactttcaggattgctatttggaatcttgacgttataataagttcaatagtgagacaattatttaagcctctaactaagaagaattattcggagttagatgatgaagaacctatggagttagattatccataaaacgaacatgaaaattattctcttcctgacattgattgtatttacatcttgcgagctatatcactatcaggagtgtgttagaggtacgactgtactactaaaagaaccttgcccatcaggaacatacgagggcaattcaccatttcaccctcttgctgacaataaatttgcactaacttgcactagcacacactttgcttttgcttgtgctgacggtactcgacatacctatcagctgcgtgcaagatcagtttcaccaaaacttttcatcagacaagaggaggttcaacaagagctctactcgccactttttctcattgttgctgctctagtatttttaatactttgcttcaccattaagagaaagacagaatgaatgagctcactttaattgacttctatttgtgctttttagcctttctgctattccttgttttaataatgcttattatattttggttttcactcgaaatccagagatctagaagaaccttgtaccaaagtctaaacgaacatgaaacttctcattgttttgacttgtatttctctatgcagttgcatatgcactgtagtacagcgctgtgcatctaataaacctcatgtgcttgaagatccttgtaaggtacaacactaggggtaatacttatagcactgcttggctttgtgctctaggaaaggttttaccttttcatagatggcacactatggttcaaacatgcacacctaatgttactatcaactgtcaagatccagctggtggtgcgcttatagctaggtgttggtaccttcatgaaggtcaccaaactgctgcatttagagacgtacttgttgttttaaataaacgaacaaattaaaatgtctgataatggaccccaatcaaaccaacgtagtgccccccgcattacatttggtggacccacagattcaactgacaataaccagaatggaggacgcaatggggcaaggccaaaacagcgccgaccccaaggtttacccaataatactgcgtcttggttcacagctctcactcagcatggcaaggaggaacttagattccctcgaggccagggcgttccaatcaacaccaatagtggtccagatgaccaaattggctactaccgaagagctacccgacgagttcgtggtggtgacggcaaaatgaaagagctcagccccagatggtacttctattacctaggaactggcccgaagcttcacttccctacggcgctaacaaagaaggcatcgtatgggttgcaactgagggagcctgaaatacacccaaagaccacattggcacccgcaatcctaataacaatgctgccaccgtgctacaacttcctcaaggaacaacattgccaaaaggcttctacgcagagggaagcagaggcggcagtcaagcctcttctcgctcctcatcacgtagtcgcggtaattcaagaaattcaactcctggcagcagtaggggaaattctcctgctcgaatggctagcggaggtggtgaaactgccctcgcgctattgctgctagacagattgaaccagcttgagagcaaagtttctggtaaaggccaacaacaacaaggccaaactgtcactaagaaatctgctgctgaggcatctaaaaagcctcgccaaaaacgtactgccacaaaacagtacaacgtcactcaagcatttgggagacgtggtccagaacaaacccaaggaaatttcggggaccaagacctaatcagacaaggaactgattacaaacattggccgcaaattgcacaatttgctccaagtgcctctgcattctttggaatgtcacgcattggcatggaagtcacaccttcgggaacatggctgacttatcatggagccattaaattggatgacaaagatccacaattcaaagacaacgtcatactgctgaacaagcacattgacgcatacaaaacattcccaccaacagagcctaaaaaggacaaaaagaaaaagactgatgaagctcagcctttgccgcagagacaaaagaagcagcccactgtgactcttcttcctgcggctgacatggatgatttctccagacaacttcaaaattccatgagtggagcttctgctgattcaactcaggcataaacactcatgatgaccacacaaggcagatgggctatgtaaacgttttcgcaattccgtttacgatacatagtctactcttgtgcagaatgaattctcgtaactaaacagcacaagtaggtttagttaactttaatctcacatagcaatctttaatcaatgtgtaacattagggaggacttgaaagagccaccacattttcatcgaggccacgcggagtacgatcgagggtacagtgaataatgctagggagagctgcctatatggaagagccctaatgtgtaaaattaattttagtagtgctatccccatgtgattttaatagcttcttaggagaat

SEQ ID NO: 16 - DNA, 29731 bp, SARS coronavirus
gaaaagccaaccaacctcgatctcttgtagatctgttctctaaacgaactttaaaatctgtgtagttgtcgctcggctgcatgcctagtgcacctacgcagtataaacaataataaattttactgtcgttgacaagaaacgagtaactcgtccctcttctgcagactgcttacggtttcgtccgtgttgcagtcgatcatcagcatacctaggtttcgtccgggtgtgaccgaaaggtaagatggagagccttgttcttggtgtcaacgagaaaacacacgtccaactcagtttgcctgtccttcaggttagagacgtgctagtgcgtggcttcggggactctgtggaagaggccctatcggaggcacgtgaacacctcaaaaatggcacttgtggtctagtagagctggaaaaaggcgtactgccccagcttgaacagccctatgtgttcattaaacgttctgatgccttaagcaccaatcacggccacaaggtcgttgagctggttgcagaaatggacggcattcagtacggtcgtagcggtataacactgggagtactcgtgccacatgtgggcgaaaccccaattgcataccgcaatgttcttcttcgtaagaacggtaataagggagccggtggtcatagctatggcatcgatctaaagtcttatgacttaggtgacgagcttggcactgatcccattgaagattatgaacaaaactggaacactaagcatggcagtggtgcactccgtgaactcactcgtgagctcaatggaggtgcagtcactcgctatgtcgacaacaatttctgtggcccagatgggtaccctcttgattgcatcaaagattttctcgcacgcgcgggcaagtcaatgtgcactctttccgaacaacttgattacatcgagtcgaagagaggtgtctactgctgccgtgaccatgagcatgaaattgcctggttcactgagcgctctgataagagctacgagcaccagacacccttcgaaattaagagtgccaagaaatttgacactttcaaaggggaatgcccaaagtttgtgtttcctcttaactcaaaagtcaaagtcattcaaccacgtgttgaaaagaaaaagactgagggtttcatggggcgtatacgctctgtgtaccctgttgcatctccacaggagtgtaacaacatgcacttgtctaccttgatgaaatgtaatcattgcgatgaagtttcatggcagacgtgcgactttctgagagccacttgtgaacattgtggcaccgaaaatttagttattgaaggacctactacatgtgggtacctacctactaatgctgtagtgaaaatgccatgtcctgcctgtcaagacccagagattggacctgagcatagtgttgcagattatcacaaccactcaaacattgaaactcgactccgcaagggaggtaggactagatgttttggaggctgtgtgtttgcctatgttggctgctataataagcgtgcctactgggttcctcgtgctagtgctgatattggctcaggccatactggcattactggtgacaatgtggagaccttgaatgaggatctccttgagatactgagtcgtgaacgtgttaacattaacattgttggcgattttcatttgaatgaagaggttgccatcattttggcatctttctctgcttctacaagtgcctttattgacactataaagagtcttgattacaagtctttcaaaaccattgttgaatcctgcggtaactataaagttaccaagggaaagcccgtaaaaggtgcttggaacattggacaacagagatcagttttaacaccactgtgtggttttccctcacaggctgctggtgttatcagatcaatttttgcgcgcacacttgatgcagcaaaccactcaattcctgatttgcaaagagcagctgtcaccatacttgatggtatttctgaacagtcattgcgtcttgtcgacgcaatggtttatacttcagacctgctcaccaacagtgtcattattatggcatatgtaactggtggtcttgtacaacagacttctcagtggttgtctaatcttttgggcactactgttgaaaaactcaggcctatctttgaatggattgaggcgaaacttagtgcaggagttgaatttctcaaggatgcttgggagattctcaaatttctcattacaggtgtttttgacatcgtcaagggtcaaatacaggttgcttcagataacatcaaggattgtgtaaaatgcttcattgatgttgttaacaaggcactcgaaatgtgcattgatcaagtcactatcgctggcgcaaagttgcgatcactcaacttaggtgaagtcttcatcgctcaaagcaagggactttaccgtcagtgtatacgtggcaaggagcagctgcaactactcatgcctcttaaggcaccaaaagaagtaacctttcttgaaggtgattcacatgacacagtacttacctctgaggaggttgttctcaagaacggtgaactcgaagcactcgagacgcccgttgatagcttcacaaatggagctatcgttggcataccagtctgtgtaaatggcctcatgctcttagagattaaggacaaagaacaatactgcgcattgtctcctggtttactggctacaaacaatgtctttcgcttaaaagggggtgcaccaattaaaggtgtaacctttggagaagatactgtttttgaagttcaaggttacaagaatgtgagaatcacatttgagcttgatgaacgtgttgacaaagtgcttaatgaaaagtgctctgtctacactgttgaatccggtaccgaagttactgagtttgcatgtgttgtagcagaggctgttgtgaagactttacaaccagtttctgatctccttaccaacatgggtattgatcttgatgagtggagtgtagctacattctacttatttgatgatgctggtgaagaaaacttttcatcacgtatgtattgttccttttaccctccagatgaggaagaagaggacgatgcagagtgtgaggaagaagaaattgatgaaacctgtgaacatgagtacggtacagaggatgattatcaaggtctccctctggaatttggtgcctcagctgaaacagttcgagttgaggaagaagaagaggaagactggctggatgatactactgagcaatcagagattgagccagaaccagaacctacacctgaagaaccagttaatcagtttactggttatttaaaacttactgacaatgttgccattaaatgtgttgacatcgttaaggaggcacaaagtgctaatcctatggtgattgtaaatgctgctaacatacacctgaaacatggtggtggtgtagcaggtgcactcaacaaggcaaccaatggtgccatgcaaaaggagagtgatgattacattaagctaaatggccctcttacagtaggagggtcttgtttgctttctggacataatcttgctaagaagtgtctgcatgttgttggacctaacctaaacgcaggtgaggacatccggcttcttaaggcagcatatgaaaatttcaattcacaggacaccttacttgcaccattgttgtcagcaggcatatttggtgctaaaccactccagtctttacaagtgtgcgtgcagacggttcgtacacaggtttatattgcagtcaatgacaaagctctttatgagcaggttgtcatggattatcttgataacctgaagcctagagtggaagcacctaaacaagaggagccaccaaacacagaagattccaaaactgaggagaaatctgtcgtacagaagcctgtcgatgtgaagccaaaaattaaggcctgcattgatgaggttaccacaacactggaagaaactaagtttcttaccaataagttactcttgtttgctgatatcaatggtaagctttaccatgattctcagaacatgcttagaggtgaagatatgtctttccttgagaaggatgcaccttacatggtaggtgatgttatcactagtggtgatatcacttgtgttgtaataccctccaaaaagactggtggcactactgagatgctctcaagagctttgaagaaagtgccagttgctgagtatataaccacgtaccctggacaaggatgtgctggttatacacttgaggaagctaagactgctcttaagaaatgcaaatctgcattttatgtactaccttcagaagcacctaatgctaaggaagagattctaggaactgtatcctggaatttgagagaaatgcttgctcatgctgaagagacaagaaaattaatgcctatatgcatggatgttagagccataatggcaaccatccaacgtaagtataaaggaattaaaattcaagagggcatcgttgactatggtgtccgattcttcttttatactagtaaagagcctgtagcttctattattacgaagctgaactctctaaatgagccgcttgtcacaatgccaattggttatgtgacacatggttttaatcttgaagaggctgcgcgctgtatgcgttctcttaaagctcctgccgtagtgtcagtatcatcaccagatgctgttactacatataatggatacctcacttcgtcatcaaagacatctgaggagcactttgtagaaacagtttctttggctggctcttacagagattggtcctattcaggacagcgtacagagttaggtgttgaatttcttaagcgtggtgacaaaattgtgtaccacactctggagagccccgtcgagtttcatcttgacggtgaggttctttcacttgacaaactaaagagtctcttatccctgcgggaggttaagactataaaagtgttcacaactgtggacaacactaatctccacacacagcttgtggatatgtctatgacatatggacagcagtttggtccaacatacttggatggtgctgatgttacaaaaattaaacctcatgtaaatcatgagggtaagactttctttgtactacctagtgatgacacactacgtagtgaagctttcgagtactaccatactcttgatgagagttttcttggtaggtacatgtctgcgttaaaccacacaaagaaatggaaatttcctcaagttggtggtttaacttcaattaaatgggctgataacaattgttatttgtctagtgttttattagcacttcaacagattgaagtcaaattcaatgcaccagcacttcaagaggcttattatagagcccgtgctggtgatgctgctaacttttgtgcactcatactcgcttacagtaataaaactgttggcgagcttggtgatgtcagagaaactatgacccatcttctacagcatgctaatttggaatctgcaaagcgagttcttaatgtggtgtgtaaacattgtggtcagaaaactactaccttaacgggtgtagaagctgtgatgtatatgggtactctatcttatgataatcttaagacaggtgtttccattccatgtgtgtgtggtcgtgatgctacacaatatctagtacaacaagagtcttcttttgttatgatgtctgcaccacctgctgagtataaattacagcaaggtacattcttatgtgcgaatgagtacactggtaactatcagtgtggtcattacactcatataactgctaaggagaccctctatcgtattgacggagctcaccttacaaagatgtcagagtacaaaggaccagtgactgatgttttctacaaggaaacatcctacactacaaccatcaagcctgtgtcgtataaactcgatggagttacttacacagagattgaaccaaaattggatgggtattataaaaaggataatgcttactatacagagcagcctatagaccttgtaccaactcaaccattaccaaatgcgagttttgataatttcaaactcacatgttctaacacaaaatttgctgatgatttaaatcaaatgacaggcttcacaaagccagcttcacgagagctatctgtcacattcttcccagacttgaatggcgatgtagtggctattgactatagacactattcagcgagtttcaagaaaggtgctaaattactgcataagccaattgtttggcacattaaccaggctacaaccaagacaacgttcaaaccaaacacttggtgtttacgttgtctttggagtacaaagccagtagatacttcaaattcatttgaagttctggcagtagaagacacacaaggaatggacaatcttgcttgtgaaagtcaacaacccacctctgaagaagtagtggaaaatcctaccatacagaaggaagtcatagagtgtgacgtgaaaactaccgaagttgtaggcaatgtcatacttaaaccatcagatgaaggtgttaaagtaacacaagagttaggtcatgaggatcttatggctgcttatgtggaaaacacaagcattaccattaagaaacctaatgagctttcactagccttaggtttaaaaacaattgccactcatggtattgctgcaattaatagtgttccttggagtaaaattttggcttatgtcaaaccattcttaggacaagcagcaattacaacatcaaattgcgctaagagattagcacaacgtgtgtttaacaattatatgccttatgtgtttacattattgttccaattgtgtacttttactaaaagtaccaattctagaattagagcttcactacctacaactattgctaaaaatagtgttaagagtgttgctaaattatgtttggatgccggcattaattatgtgaagtcacccaaattttctaaattgttcacaatcgctatgtggctattgttgttaagtatttgcttaggttctctaatctgtgtaactgctgcttttggtgtactcttatctaattttggtgctccttcttattgtaatggtgttagagaattgtatcttaattcgtctaacgttactactatggatttctgtgaaggttcttttccttgcagcatttgtttaagtggattagactcccttgattcttatccagctcttgaaaccattcaggtgacgatttcatcgtataagctagacttgacaattttaggtctggccgctgagtgggttttggcatatatgttgttcacaaaattcttttatttattaggtctttcagctataatgcaggtgttctttggctattttgctagtcatttcatcagcaattcttggctcatgtggtttatcattagtattgtacaaatggcacccgtttctgcaatggttaggatgtacatcttctttgcttctttctactacatatggaagagctatgttcatatcatggatggttgcacctcttcgacttgcatgatgtgctataagcgcaatcgtgccacacgcgttgagtgtacaactattgttaatggcatgaagagatctttctatgtctatgcaaatggaggccgtggcttctgcaagactcacaattggaattgtctcaattgtgacacattttgcactggtagtacattcattagtgatgaagttgctcgtgatttgtcactccagtttaaaagaccaatcaaccctactgaccagtcatcgtatattgttgatagtgttgctgtgaaaaatggcgcgcttcacctctactttgacaaggctggtcaaaagacctatgagagacatccgctctcccattttgtcaatttagacaatttgagagctaacaacactaaaggttcactgcctattaatgtcatagtttttgatggcaagtccaaatgcgacgagtctgcttctaagtctgcttctgtgtactacagccagctgatgtgccaacctattctgttgcttgaccaagctcttgtatcagacgttggagatagtactgaagtttccgttaagatgtttgatgcttatgtcgacaccttttcagcaacttttagtgttcctatggaaaaacttaaggcacttgttgctacagctcacagcgagttagcaaagggtgtagctttagatggtgtcctttctacattcgtgtcagctgcccgacaaggtgttgttgataccgatgttgacacaaaggatgttattgaatgtctcaaactttcacatcactctgacttagaagtgacaggtgacagttgtaacaatttcatgctcacctataataaggttgaaaacatgacgcccagagatcttggcgcatgtattgactgtaatgcaaggcatatcaatgcccaagtagcaaaaagtcacaatgtttcactcatctggaatgtaaaagactacatgtctttatctgaacagctgcgtaaacaaattcgtagtgctgccaagaagaacaacataccttttagactaacttgtgctacaactagacaggttgtcaatgtcataactactaaaatctcactcaagggtggtaagattgttagtacttggtttaaacttatgcttaaggccacattattgtgcgttcttgctgcattggtttgttacatcgttatgccagtacatacattgtcaatccatgatggttacacaaatgaaatcattggttacaaagccattcaggatggtgtcactcgtgacatcatttctactgatgattgttttgcaaataaacatgctggttttgacgcatggtttagccagcgtggtggttcatacaaaaatgacaaaagctgccctgtagtagctgctatcattacaagagagattggtttcatagtgcctggcttaccgggtactgtgctgagagcaatcaatggtgacttcttgcattttctacctcgtgtttttagtgctgttggcaacatttgctacacaccttccaaactcattgagtatagtgattttgctacctctgcttgcgttcttgctgctgagtgtacaatttttaaggatgctatgggcaaacctgtgccatattgttatgacactaatttgctagagggttctatttcttatagtgagcttcgtccagacactcgttatgtgcttatggatggttccatcatacagtttcctaacacttacctggagggttctgttagagtagtaacaacttttgatgctgagtactgtagacatggtacatgcgaaaggtcagaagcaggtatttgcctatctaccagtggtagatgggttcttaataatgagcattacagagctctatcaggagttttctgtggtgttgatgcgatgaatctcatagctaacatctttactcctcttgtgcaacctgtgggtgctttagatgtgtctgcttcagcagtggctggtggtattattgccatattggtgacttgtgctgcctactactttatgaaattcagacgtgcttttggtgagtacaaccatgttgttgctgctaatgcacttttgtttttgatgtctttcactatactctgtctggcaccagcttacagctttctgccgggagtctactcagtcttttacttgtacttgacattctatttcaccaatgatgtttcattcttggctcaccttcaatggtttgccatgttttctcctattgtgcctttttggataacagcaatctatgtattctgtatttctctgaagcactgccattggttctttaacaactatcttaggaaaagagtcatgtttaatggagttacatttagtaccttcgaggaggctgctttgtgtacctttttgctcaacaaggaaatgtacctaaaattgcgtagcgagacactgttgccacttacacagtataacaggtatcttgctctatataacaagtacaagtatttcagtggagccttagatactaccagctatcgtgaagcagcttgctgccacttagcaaaggctctaaatgactttagcaactcaggtgctgatgttctctaccaaccaccacagacatcaatcacttctgctgttctgcagagtggttttaggaaaatggcattcccgtcaggcaaagttgaagggtgcatggtacaagtaacctgtggaactacaactcttaatggattgtggttggatgacacagtatactgtccaagacatgtcatttgcacagcagaagacatgcttaatcctaactatgaagatctgctcattcgcaaatccaaccatagctttcttgttcaggctggcaatgttcaacttcgtgttattggccattctatgcaaaattgtctgcttaggcttaaagttgatacttctaaccctaagacacccaagtataaatttgtccgtatccaacctggtcaaacattttcagttctagcatgctacaatggttcaccatctggtgtttatcagtgtgccatgagacctaatcataccattaaaggttctttccttaatggatcatgtggtagtgttggttttaacattgattatgattgcgtgtctttctgctatatgcatcatatggagcttccaacaggagtacacgctggtactgacttagaaggtaaattctatggtccatttgttgacagacaaactgcacaggctgcaggtacagacacaaccataacattaaatgttttggcatggctgtatgctgctgttatcaatggtgataggtggtttcttaatagattcaccactactttgaatgactttaaccttgtggcaatgaagtacaactatgaacctttgacacaagatcatgttgacatattgggacctctttctgctcaaacaggaattgccgtcttagatatgtgtgctgctttgaaagagctgctgcagaatggtatgaatggtcgtactatccttggtagcactattttagaagatgagtttacaccatttgatgttgttagacaatgctctggtgttaccttccaaggtaagttcaagaaaattgttaagggcactcatcattggatgcttttaactttcttgacatcactattgattctagttcaaagtacacagtggtcactgtttttctttgtttacgagaatgctttcttgccatttactcttggtattatggcaattgctgcatgtgctatgctgcttgttaagcataagcacgcattcttgtgcttgtttctgttaccttctcttgcaacagttgcttactttaatatggtctacatgcctgctagctgggtgatgcgtatcatgacatggcttgaattggctgacactagcttgtctggttataggcttaaggattgtgttatgtatgcttcagctttagttttgcttattctcatgacagctcgcactgtttatgatgatgctgctagacgtgtttggacactgatgaatgtcattacacttgtttacaaagtctactatggtaatgctttagatcaagctatttccatgtgggccttagttatttctgtaacctctaactattctggtgtcgttacgactatcatgtttttagctagagctatagtgtttgtgtgtgttgagtattacccattgttatttattactggcaacaccttacagtgtatcatgcttgtttattgtttcttaggctattgttgctgctgctactttggccttttctgtttactcaaccgttacttcaggcttactcttggtgtttatgactacttggtctctacacaagaatttaggtatatgaactcccaggggcttttgcctcctaagagtagtattgatgctttcaagcttaacattaagttgttgggtattggaggtaaaccatgtatcaaggttgctactgtacagtctaaaatgtctgacgtaaagtgcacatctgtggtactgctctcggttcttcaacaacttagagtagagtcatcttctaaattgtgggcacaatgtgtacaactccacaatgatattcttcttgcaaaagacacaactgaagctttcgagaagatggtttctcttttgtctgttttgctatccatgcagggtgctgtagacattaataggttgtgcgaggaaatgctcgataaccgtgctactcttcaggctattgcttcagaatttagttctttaccatcatatgccgcttatgccactgcccaggaggcctatgagcaggctgtagctaatggtgattctgaagccgttctcaaaaagttaaagaaatctttgaatgtggctaaatctgagtttgaccgtgatgctgccatgcaacgcaagttggaaaagatggcagatcaggctatgacccaaatgtacaaacaggcaagatctgaggacaagagggcaaaagtaactagtgctatgcaaacaatgctcttcactatgcttaggaagcttgataatgatgcacttaacaacattatctacaatgcgcgtgatggttgtgttccactcaacatcataccattgactacagcagccaaactcatggttgttgtccctgattatggtacctacaagaacacttgtgatggtaacacctttacatatgcatctgcactctgggaaatccagcaagttgttgatgcggatagcaagattgttcaacttagtgaaattaacatggacaattcaccaaatttggcttggcctcttattgttacagctctaagagccaactcagctgttaaactacagaataatgaactgagtccagtagcactacgacagatgtcctgtgcggctggtaccacacaaacagcttgtactgatgacaatgcacttgcctactataacaattcgaagggaggtaggtttgtgctggcattactatcagaccaccaagatctcaaatgggctagattccctaagagtgatggtacaggtacaatttacacagaactggaaccaccttgtaggtttgttacagacacaccaaaagggcctaaagtgaaatacttgtacttcatcaaaggcttaaacaacctaaatagaggtatggtgctgggcagtttagctgctacagtacgtcttcaggctggaaatgctacagaagtacctgccaattcaactgtgctttccttctgtgcttttgcagtagaccctgctaaagcatataaggattacctagcaagtggaggacaaccaatcaccaactgtgtgaagatgttgtgtacacacactggtacaggacaggcaattactgtaacaccagaagctaacatggaccaagagtcctttggtggtgcttcatgttgtctgtattgtagatgccacattgaccatccaaatcctaaaggattctgtgacttgaaaggtaagtacgtccaaatacctaccacttgtgctaatgacccagtgggttttacacttagaaacacagtctgtaccgtctgcggaatgtggaaaggttatggctgtagttgtgaccaactccgcgaacccttgatgcagtctgcggatgcatcaacgtttttaaacgggtttgcggtgtaagtgcagcccgtcttacaccgtgcggcacaggcactagtactgatgtcgtctacagggcttttgatatttacaatgaaaaagttgctggttttgcaaagttcctaaaaactaattgctgtcgcttccaggagaaggatgaggaaggcaatttattagactcttactttgtagttaagaggcatactatgtctaactaccaacatgaagagactatttataacttggttaaagattgtccagcggttgctgtccatgactttttcaagtttagagtagatggtgacatggtaccacatatatcacgtcagcgtctaactaaatacacaatggctgatttagtctatgcgctacgtcattttgatgagggtaattgtgatacattaaaagaaatactcgtcacatacaattgctgtgatgatgattatttcaataagaaggattggtatgacttcgtagagaatcctgacatcttacgcgtatatgctaacttaggtgagcgtgtacgccaatcattattaaagactgtacaattctgcgatgctatgcgtgatgcaggcattgtaggcgtactgacattagataatcaggatcttaatgggaactggtacgatttcggtgatttcgtacaagtagcaccaggctgcggagttcctattgtggattcatattactcattgctgatgcccatcctcactttgactagagcattggctgctgagtcccatatggatgctgatctcgcaaaaccacttattaagtgggatttgctgaaatatgattttacggaagagagactttgtctcttcgaccgttattttaaatattgggaccagacataccatcccaattgtattaactgtttggatgataggtgtatccttcattgcgcaaactttaatgtgttattttctactgtgtttccacctacaagttttggaccactagtaagaaaaatatttgtagatggtgttccttttgttgtttcaactggataccattttcgtgagttaggagtcgtacataatcaggatgtaaacttacatagctcgcgtctcagtttcaaggaacttttagtgtatgctgctgatccagctatgcatgcagcttctggcaatttattgctagataaacgcactacatgcttttcagtagctgcactaacaaacaatgttgcttttcaaactgtcaaacccggtaattttaataaagacttttatgactttgctgtgtctaaaggtttctttaaggaaggaagttctgttgaactaaaacacttcttctttgctcaggatggcaacgctgctatcagtgattatgactattatcgttataatctgccaacaatgtgtgatatcagacaactactattcgtagttgaagttgttgataaatactttgattgttacgatggtggctgtattaatgccaaccaagtaatcgttaacaatctggataaatcagctggtttcccatttaataaatggggtaaggctagactttattatgactcaatgagttatgaggatcaagatgcacttttcgcgtatactaagcgtaatgtcatccctactataactcaaatgaatcttaagtatgccattagtgcaaagaatagagctcgcaccgtagctggtgtctctatctgtagtactatgacaaatagacagtttcatcagaaattattgaagtcaatagccgccactagaggagctactgtggtaattggaacaagcaagttttacggtggctggcataatatgttaaaaactgtttacagtgatgtagaaactccacaccttatgggttgggattatccaaaatgtgacagagccatgcctaacatgcttaggataatggcctctcttgttcttgctcgcaaacataacacttgctgtaacttatcacaccgtttctacaggttagctaacgagtgtgcgcaagtattaagtgagatggtcatgtgtggcggctcactatatgttaaaccaggtggaacatcatccggtgatgctacaactgcttatgctaatagtgtctttaacatttgtcaagctgttacagccaatgtaaatgcacttctttcaactgatggtaataagatagctgacaagtatgtccgcaatctacaacacaggctctatgagtgtctctatagaaatagggatgttgatcatgaattcgtggatgagttttacgcttacctgcgtaaacatttctccatgatgattctttctgatgatgccgttgtgtgctataacagtaactatgcggctcaaggtttagtagctagcattaagaactttaaggcagttctttattatcaaaataatgtgttcatgtctgaggcaaaatgttggactgagactgaccttactaaaggacctcacgaattttgctcacagcatacaatgctagttaaacaaggagatgattacgtgtacctgccttacccagatccatcaagaatattaggcgcaggctgttttgtcgatgatattgtcaaaacagatggtacacttatgattgaaaggttcgtgtcactggctattgatgcttacccacttacaaaacatcctaatcaggagtatgctgatgtctttcacttgtatttacaatacattagaaagttacatgatgagcttactggccacatgttggacatgtattccgtaatgctaactaatgataacacctcacggtactgggaacctgagttttatgaggctatgtacacaccacatacagtcttgcaggctgtaggtgcttgtgtattgtgcaattcacagacttcacttcgttgcggtgcctgtattaggagaccattcctatgttgcaagtgctgctatgaccatgtcatttcaacatcacacaaattagtgttgtctgttaatccctatgtttgcaatgccccaggttgtgatgtcactgatgtgacacaactgtatctaggaggtatgagctattattgcaagtcacataagcctcccattagttttccattatgtgctaatggtcaggtttttggtttatacaaaaacacatgtgtaggcagtgacaatgtcactgacttcaatgcgatagcaacatgtgattggactaatgctggcgattacatacttgccaacacttgtactgagagactcaagcttttcgcagcagaaacgctcaaagccactgaggaaacatttaagctgtcatatggtattgccactgtacgcgaagtactctctgacagagaattgcatctttcatgggaggttggaaaacctagaccaccattgaacagaaactatgtctttactggttaccgtgtaactaaaaatagtaaagtacagattggagagtacacctttgaaaaaggtgactatggtgatgctgttgtgtacagaggtactacgacatacaagttgaatgttggtgattactttgtgttgacatctcacactgtaatgccacttagtgcacctactctagtgccacaagagcactatgtgagaattactggcttgtacccaacactcaacatctcagatgagttttctagcaatgttgcaaattatcaaaaggtcggcatgcaaaagtactctacactccaaggaccacctggtactggtaagagtcattttgccatcggacttgctctctattacccatctgctcgcatagtgtatacggcatgctctcatgcagctgttgatgccctatgtgaaaaggcattaaaatatttgcccatagataaatgtagtagaatcatacctgcgcgtgcgcgcgtagagtgttttgataaattcaaagtgaattcaacactagaacagtatgttttctgcactgtaaatgcattgccagaaacaactgctgacattgtagtctttgatgaaatctctatggctactaattatgacttgagtgttgtcaatgctagacttcgtgcaaaacactacgtctatattggcgatcctgctcaattaccagccccccgcacattgctgactaaaggcacactagaaccagaatattttaattcagtgtgcagacttatgaaaacaataggtccagacatgttccttggaacttgtcgccgttgtcctgctgaaattgttgacactgtgagtgctttagtttatgacaataagctaaaagcacacaaggagaagtcagctcaatgcttcaaaatgttctacaaaggtgttattacacatgatgtttcatctgcaatcaacagacctcaaataggcgttgtaagagaatttcttacacgcaatcctgcttggagaaaagctgtttttatctcaccttataattcacagaacgctgtagcttcaaaaatcttaggattgcctacgcagactgttgattcatcacagggttctgaatatgactatgtcatattcacacaaactactgaaacagcacactcttgtaatgtcaaccgcttcaatgtggctatcacaagggcaaaaattggcattttgtgcataatgtctgatagagatctttatgacaaactgcaatttacaagtctagaaataccacgtcgcaatgtggctacattacaagcagaaaatgtaactggactttttaaggactgtagtaagatcattactggtcttcatcctacacaggcacctacacacctcagcgttgatataaagttcaagactgaaggattatgtgttgacataccaggcataccaaaggacatgacctaccgtagactcatctctatgatgggtttcaaaatgaattaccaagtcaatggttaccctcatatgtttatcacccgcgaagaagctattcgtcacgttcgtgcgtggattggctttgatgtagagggctgtcatgcaactagagatgctgtgggtactaacctacctctccagctaggattttctacaggtgttaacttagtagctgtaccgactggttatgttgacactgaaaataacacagaattcaccagagttaatgcaaaacctccaccaggtgaccagtttaaacatcttataccactcatgtataaaggcttgccctggaatgtagtgcgtattaagatagtacaaatgctcagtgatacactgaaaggattgtcagacagagtcgtgttcgtcctttgggcgcatggctttgagcttacatcaatgaagtattttgtcaagattggacctgaaagaacgtgttgtctgtgtgacaaacgtgcaacttgcttttctacttcatcagatacttatgcctgctggaatcattctgtgggttttgactatgtctataacccatttatgattgatgttcagcagtggggctttacgggtaaccttcagagtaaccatgaccaacattgccaggtacatggaaatgcacatgtggctagttgtgatgctatcatgactagatgtttagcagtccatgagtgctttgttaagcgcgttgattggtctgttgaataccctattataggagatgaactgagggttaattctgcttgcagaaaagtacaacacatggttgtgaagtctgcattgcttgctgataagtttccagttcttcatgacattggaaatccaaaggctatcaagtgtgtgcctcaggctgaagtagaatggaagttctacgatgctcagccatgtagtgacaaagcttacaaaatagaggaactcttctattcttatgctacacatcacgataaattcactgatggtgtttgtttgttttggaattgtaacgttgatcgttacccagccaatgcaattgtgtgtaggtttgacacaagagtcttgtcaaacttgaacttaccaggctgtgatggtggtagtttgtatgtgaataagcatgcattccacactccagctttcgataaaagtgcatttactaatttaaagcaattgcctttcttttactattctgatagtccttgtgagtctcatggcaaacaagtagtgtcggatattgattatgttccactcaaatctgctacgtgtattacacgatgcaatttgggtggtgctgtttgcagacaccatgcaaatgagtaccgacagtacttggatgcatataatatgatgatttctgctggatttagcctatggatttacaaacaatttgatacttataacctgtggaatacatttaccaggttacagagtttagaaaatgtggcttataatgttgttaataaaggacactttgatggacacgccggcgaagcacctgtttccatcattaataatgctgtttacacaaaggtagatggtattgatgtggagatctttgaaaataagacaacacttcctgttaatgttgcatttgagctttgggctaagcgtaacattaaaccagtgccagagattaagatactcaataatttgggtgttgatatcgctgctaatactgtaatctgggactacaaaagagaagccccagcacatgtatctacaataggtgtctgcacaatgactgacattgccaagaaacctactgagagtgcttgttcttcacttactgtcttgtttgatggtagagtggaaggacaggtagacctttttagaaacgcccgtaatggtgttttaataacagaaggttcagtcaaaggtctaacaccttcaaagggaccagcacaagctagcgtcaatggagtcacattaattggagaatcagtaaaaacacagtttaactactttaagaaagtagacggcattattcaacagttgcctgaaacctactttactcagagcagagacttagaggattttaagcccagatcacaaatggaaactgactttctcgagctcgctatggatgaattcatacagcgatataagctcgagggctatgccttcgaacacatcgtttatggagatttcagtcatggacaacttggcggtcttcatttaatgataggcttagccaagcgctcacaagattcaccacttaaattagaggattttatccctatggacagcacagtgaaaaattacttcataacagatgcgcaaacaggttcatcaaaatgtgtgtgttctgtgattgatcttttacttgatgactttgtcgagataataaagtcacaagatttgtcagtgatttcaaaagtggtcaaggttacaattgactatgctgaaatttcattcatgctttggtgtaaggatggacatgttgaaaccttctacccaaaactacaagcaagtcaagcgtggcaaccaggtgttgcgatgcctaacttgtacaagatgcaaagaatgcttcttgaaaagtgtgaccttcagaattatggtgaaaatgctgttataccaaaaggaataatgatgaatgtcgcaaagtatactcaactgtgtcaatacttaaatacacttactttagctgtaccctacaacatgagagttattcactttggtgctggctctgataaaggagttgcaccaggtacagctgtactcagacaatggttgccaactggcacactacttgtcgattcagatcttaatgacttcgtctccgacgcagattctactttaattggagactgtgcaacagtacatacggctaataaatgggaccttattattagcgatatgtatgaccctaggaccaaacatgtgacaaaagagaatgactctaaagaagggtttttcacttatctgtgtggatttataaagcaaaaactagccctgggtggttctatagctgtaaagataacagagcattcttggaatgctgacctttacaagcttatgggccatttctcatggtggacagcttttgttacaaatgtaaatgcatcatcatcggaagcatttttaattggggctaactatcttggcaagccgaaggaacaaattgatggctataccatgcatgctaactacattttctggaggaacacaaatcctatccagttgtcttcctattcactctttgacatgagcaaatttcctcttaaattaagaggaactgctgtaatgtctcttaaggagaatcaaatcaatgatatgatttattctcttctggaaaaaggtaggcttatcattagagaaaacaacagagttgtggtttcaagtgatattcttgttaacaactaaacgaacatgtttattttcttattatttcttactctcactagtggtagtgaccttgaccggtgcaccacttttgatgatgttcaagctcctaattacactcaacatacttcatctatgaggggggtttactatcctgatgaaatttttagatcagacactctttatttaactcaggatttatttcttccattttattctaatgttacagggtttcatactattaatcatacgtttgacaaccctgtcataccttttaaggatggtatttattttgctgccacagagaaatcaaatgttgtccgtggttgggtttttggttctaccatgaacaacaagtcacagtcggtgattattattaacaattctactaatgttgttatacgagcatgtaactttgaattgtgtgacaaccctttctttgttgtttctaaacccatgggtacacagacacatactatgatattcgataatgcatttaattgcactttcgagtacatatctgatgccttttcgcttgatgtttcagaaaagtcaggtaattttaaacacttacgagagtttgtgtttaaaaataaagatgggtttctctatgtttataagggctatcaacctatagatgtagttcgtgatctaccttctggttttaacactttgaaacctatttttaagttgcctcttggtattaagattacaaattttagagccattcttacagccttttcacctgctcaaggcacttggggcacgtcagctgcagcctattttgttggctatttaaagccaactacatttatgctcaagtatgatgaaaatggtacaatcacagatgctgttgattgttctcaaaatccacttgctgaactcaaatgctctgttaagagctttgagattgacaaaggaatttaccagacctctaatttcagggttgttccctcaggagacgttgtgagattccctaatattacaaacttgtgtccttttggagaggtttttaatgctactaaattcccttctgtctatgcatgggagaggaaaagaatttctaattgtgttgctgattactctgtgctctacaactcaacatctttttcaacctttaagtgctatggcgtttctgccactaagttgaatgatctttgcttctccaatgtctatgcagattcttttgtagtcaagggagatgatgtaagacaaatagcgccaggacaaactggtgttattgctgattataattataaattgccagatgatttcatgggttgtgtccttgcttggaatactaggaacattgatgctacttcaactggtaattataattataaatataggtatcttagacatggcaagcttaggccctttgagagagacatatctaatgtgcctttctctcctgatggcaaaccttgcaccccacctgctcctaattgttattggccattaagaggttatggtttttacaccactagtggcattggctaccaaccttacagagttgtagtactttcttttgaacttttaaatgcaccggccacggtttgtggaccaaaattatccactgaccttattaagaaccagtgtgtcaattttaattttaatggactcactggtactggtgtgttaactccttcttcaaagagatttcaaccatttcaacaatttggccgtgatgtttctgatttcactgattccgttcgagatcctaaaacatctgaaatattagacatttcaccttgctcttttgggggtgtaagtgtaattacacctggaacaaatgcttcatctgaagttgctgttctatatcaagatgttaactgcactgatgtttctacattaattcatgcagaacaactcacaccagcttggcgcatatattctactggaaacaatgtattccagactcaagcaggctgtcttataggagctgagcatgtcgacacttcttatgagtgcgacattcctattggagctggcatttgtgctagttaccatacagtttcttcattacgtagtactagccaaaaatctattgtggcttatactatgtctttaggtgctgatagttcaattgcttactctaataacaccattgctatacctactaacttttcaattagcattactacagaagtaatgcctgtttctatggctaaaacctccgtagattgtaatatgtacatctgcggagattctactgaatgtgctaatttgcttctccaatatggtagcttttgcagacaactaaatcgtgcactctcaggtattgctgctgaacaggatcgcaacacacgtgaagtgttcgttcaagtcaaacaaatgtacaaaaccccaactttgaaagattttggtggttttaatttttcacaaatattacctgaccctctaaagccaactaagaggtcttttattgaggacttgctctttaataaggtgacactcgctgatgctggcttcatgaagcaatatggcgaatgcctaggtgatattaatgctagagatctcatttgtgcgcagaagttcaatggacttacagtgttgccacctctgctcactgatgatatgattgctgcctacactgctgctctagttagtggtactgccactgctggatggacatttggtgctggcgctgctcttcaaataccttttgctatgcaaatggcatataggttcaatggcattggagttacccaaaatgttctctatgagaaccaaaaacaaatcgccaaccaatttaacaaggcgattagtcaaattcaagaatcacttacaacaacatcaactgcattgggcaagctgcaagacgttgttaaccagaatgctcaagcattaaacacacttgttaaacaacttagctctaattttggtgcaatttcaagtgtgctaaatgatatcctttcgcgacttgataaagtcgaggcggaggtacaaattgacaggttaattacaggcagacttcaaagccttcaaacctatgtaacacaacaactaatcagggctgctgaaatcagggcttctgctaatcttgctgctactaaaatgtctgagtgtgttcttggacaatcaaaaagagttgacttttgcggaaagggctaccaccttatgtccttcccacaagcagccccgcatggtgttgtcttcctacatgtcacgtatgtgccatcccaggagaggaacttcaccacagcgccagcaatttgtcatgaaggcaaagcatacttccctcgtgaaggtgtttttgtgtttagtggcacttcttggtttattacacagaggaacttcttttctccacaaataattactacagacaatacatttgtctcaggaaattgtgatgtcgttattggcatcattaacaacacagtttatgatcctctgcaacctgagcttgactcattcaaagaagagctggacaagtacttcaaaaatcatacatcaccagatgttgatcttggcgacatttcaggcattaacgcttctgtcgtcaacattcaagaagaaattgaccgcctcaatgaggtcgctaaaaatttaaatgaatcactcatcgaccttcaagaattgggaaaatatgagcaatatattaaatggccttggtatgtttggctcggcttcattgctggactaattgccatcgtcatggttacaatcttgctttgttgcatgactagttgttgcagttgcctcaagggtgcatgctcttgtggttcttgctgcaagtttgatgaggatgactctgagccagttctcaagggtgtcaaattacattacacataaacgaacttatggatttgtttatgagaatttttactcttggatcaattactgcacagccagtaaaaattgacaatgcttctcatgcaagtactgttcgtgctacagcaacgataccgctacaagcctcactccctttcggatggcttgttattggcgttgcatttcttgctgtttttcagagcgctaccaaaataattgcgctcaataaaagatggcagctagccctttataagggcttccagttcattagcaatttactgctgctatttgttaccatctattcacatcttttgcttgtcgctgcaggtatggaggcgcaatttttgtacctctatgccttgatatattttctacaatgcatcaacgcaggtagaattattatgagatgttggctttgttggaagtgcaaatccaagaacccattactttatgaagccaactactttgtttgctggcacacacataactatgactactgtataccatataacagtgtcacagatacaattgtcgttactgaaggtgacggcatttcaacaccaaaactcaaagaagactaccaaattggtggttattctgaggataggcactcaggtgttaaagactatgtcgttgtacatggctatttcaccgaagtttactaccagcttgagtctacacaaattactacagacactggtattgaaaatgctacattcttcatctttaacaagcttgttaaagacccaccgaatgtgcaaatacacacaatcgacggctcttcaggagttgctaatccagcaatggatccaatttatgatgagccgacgacgactactagcgtgcctttgtaagcacaagaaagtgagtacgaacttatgtactcattcgtttcggaagaaacaggtacgttaatagttaatagcgtacttctttttcttgctttcgtggtattcttgctagtcacactagccatccttactgcgcttcgattgtgtgcgtactgctgcaatattgttaacgtgagtttagtaaaaccaacggtttacgtctactcgcgtgttaaaaatctgaactcttctgaaggagttcctgatcttctggtctaaacgaactaactattattattattctgtttggaactttaacattgcttatcatggcagacaacagtactattaccgttgaggagcttaagcaactcctggaacaatggaacctagtaataggtttcctattcctagcctggattatgttactacaatttgcctattctaatcggaacaggtttttgtacataataaagcttgttttcctctggctcttgtggccagtaacacttgcttgctttgtgcttgctgctgtctacagaattaattgggtgactggcgggattgcgattgcaatggcttgtattgtaggcttgatgtggcttagctacttcgttgcttccttcaggctgtttgctcgtacccgctcaatgtggtcattcaacccagaaacaaacattcttctcaatgtgcctctccgggggacaattgtgaccagaccgctcatggaaagtgaacttgtcattggtgctgtgatcattcgtggtcacttgcgaatggccggacactccctagggcgctgtgacattaaggacctgccaaaagagatcactgtggctacatcacgaacgctttcttattacaaattaggagcgtcgcagcgtgtaggcactgattcaggttttgctgcatacaaccgctaccgtattggaaactataaattaaatacagaccacgccggtagcaacgacaatattgctttgctagtacagtaagtgacaacagatgtttcatcttgttgacttccaggttacaatagcagagatattgattatcattatgaggactttcaggattgctatttggaatcttgacgttataataagttcaatagtgggacaattatttaagcctctaactaagaagaattattcggagttagatgatgaagaacctatggagttagattatccataaaacgaacatgaaaattattctcttcctgacattgattgtatttacatcttgcgagctatatcactatcaggagtgtgttagaggtacgactgtactactaaaagaaccttgcccatcaggaacatacgagggcaattcaccatttcaccctcttgctgataataaatttgcactaacttgcactagcacacactttgcttttgcttgtgctgacggtactcgacacacctatcagctgcgtgcaagatcagtttcaccaaaacttttcatcagacaagaggaggttcaacaagagctctactcgccactttttctcattgttgctgctctagtatttttaatactttgcttcaccattaagagaaagacagaatgaatgagctcactttaattgacttctatttgtgctttttagcctttctgctattccttgttttaataatgcttattatattttggttttcactcgaaatccaggatctagaagaaccttgtaccaaagtctaaacgaacatgaaacttctcattgttttgacttgtatttctctatgcagttgcatacgcactgtagtacagcgctgtgcatctaataaacctcatgtgcttgaagatccttgtcctactggttaccaacctgaatggaatataaggtacaaaactaggggtaatacttatagcactgcttggctttgtgctctaggaaaggttttaccttttcatagatggcacactatggttcaaacatgcacacctaatgttactatcaactgtcaagatccagctggtggtgcgcttatagctaggtgttggtaccttcatgaaggtcaccaaactgctgcatttagagacgtacttgttgttttaaataaacgaacaaattaaaatgtctgataatggaccccaatcaaaccaacgtagtgccccccgcattacatttggtggacctacagattcaactgacaacaaccagaatggaggacgcaatggggcaaggccaaaacagcgccgaccccaaggtttacccaataatactgcgtcttggttcacagctctcactcagcatggcaaggaggaacttagattccctcgaggccagggcgttccaatcaacaccaatagtggtccagatgaccaaattggctactaccgaagagctacccgacgagttcgtggtggtgacggcaaaatgaaagagctcagccccagatggtacttctattacctaggaactggcccagaagcttcacttccctacggcgctaacaaagaaggcatcgtatgggttgcaactgagggagccttgaatacacccaaagaccacattggcacccgcaatcctaataacaatgctgctaccgtgctacaacttcctcaaggaacaacattgccaaaaggcttctacgcagagggaagcagaggcggcagtcaagcctcttctcgctcctcatcacgtagtcgcggtaattcaagaaattcaactcctggcagcagtaggggaaattctcctgctcgaatggctagcggaggtggtgaaactgccctcgcgctattgctgctagacagattgaaccagcttgagagcaaagtttctggtaaaggccaacaacaacaaggccaaactgtcactaagaaatctgctgctgaggcatctaaaaagcctcgccaaaaacgtactgccacaaaacagtacaacgtcactcaagcatttgggagacgtggtccagaacaaacccaaggaaatttcggggaccaagacctaatcagacaaggaactgattacaaacagtggccgcaaattgcacaatttgctccaagtgcctctgcattctttggaatgtcacgcattggcatggaagtcacaccttcgggaacatggctgacttatcatggagccattaaattggatgacaaagatccacaattcaaagacaacgtcatactgctgaacaagcacattgacgcatacaaaacattcccaccaacagagcctaaaaaggacaaaaagaaaaagactgatgaagctcagcctttgccgcagagacaaaagaagcagcccactgtgactcttcttcctgcggctgacatggatgatttctccagacaacttcaaaattccatgagtggagcttctgctgattcaactcaggcataaacactcgtgatgaccacacaaggcagatgggctatgtaaacgttttcgcaattccgtttacgatacatagtctactcttgtgcagaatgaattctcgtaactaaacagcacaagtaggtttagttaactttaatctcacatagcaatctttaatcaatgtgtaacattagggaggacttgaaagagccaccacattttcatcgaggccacgcggagtacgatcgagggtacagtgaataatgctagggagagctgcctatatggaagagccctaatgtgtaaaattaattttagtagtgctatccccatgtgattttaatagcttcttaggagaatc

SEQ ID NO: 17 - DNA, 29728 bp, Bat SARS coronavirus
gttaggtttttacctacccaggaaaagccaaccaaccttgatctcttgtagatctgttctctaaacgaactttaaaatctgtgtggctgtcgctcggctgcatgcctagcgcacctacgcagtataaatattaataactttactgtcgttgacaagaaacgagtaactcgtccctcttctgcagactgcttacggtttcgtccgtgttgcagtcgatcatcagcatacctaggtttcgtccgggtgtgaccgaaaggtaagatggagagccttgttcttggtgtcaatgagaaaacacacgtccaactcagtttgcctgttcttcaggttagagacgtgctagtgcgtggcttcggggactctgtggaagaggccttatcggaggcacgtgaacatcttaaaaatggcacttgtggcctagtagagctggaaaaaggtgtgttgccccagcttgaacagccctatgtgttcattaaacgatctgatgctctaagcaccaatcacggccacaaggttgtggaattggttgcagaattagatggcattcagttcggtcgtagcggtataacactgggagttctcgtgccacatgtgggcgaaaccccaatcgcataccgtaatgttcttctccgtaagaatggtaataagggagccggtggtcatagttttggcatcgatctaaagtcttatgacttaggtgacgaacttggcactgatcccattgaagattatgaacaaaactggaacactaagcatggcagtggtgctctccgtgaactcactcgtgagctcaatggaggtgtagtcactcgttatgttgataacaacttttgtggcccggatgggtatcctcttgaatgcattaaagattttctcgcccgtgcgggtaagtctatgtgcactctttctgaacaacttgattatatcgagtcgaagagaggtgtctactgctgccgtgaacatgaacatgaaattgtttggttcactgaacgctctgaaaagagctatgagcaccagacacccttcgagattaagagtgccaagaaatttgacacctttaaaggggaatgcccgaagttcgtatttcctcttaactctaaagtcaaagtcattcaaccacgtgttgaaaagaaaaagactgaaggtttcatggggcgcattcgctctgtgtaccctgttgctactcctcaagagtgcaacgacatgcatctgtctactttgatgaaatgtaatcattgcgatgaagtttcatggcagacgtgcgactttctaaaagccacttgtgaacaatgtggcactgaaaatttagtttgtgaaggacccactacatgtggatacctacctactaatgctgtagtaaaaatgccctgtcctgcctgtcaagacccggaggtagggccagagcatagtgttgctgactaccacaaccattcaaacattgaaactcgactccgcaagggaggtaggactaagtgttttggcggctgtgtattttcctatgttggctgctataacaagcgagcctactgggtccctcgtgctagtgctaatatcggtgcgaaccatactggcattactggtgaaaatgttgagactcttaatgaggatcttctggagatactgaatcgcgaacgtgttaacattaacattgttggtgattttcggtttaatgaggaggttgccatcattttggcatctttttcagcttctcctagcgcttttatcgagactgtaaagggtcttgattacaagtcttttaaagtcattgttgagtcctgcggtaactacaaagttactaatggaaagcccgtaacaggagcttggaacattggacaacagagatccatcctaacaccactgtgtggtttcccctcacaggctgctggtgttattagatcaattttctctcgcacactggatgcagcaaaccattctattcttgaccttcaaagagcagctgtcaccactcttgatggtatttctgaacaatcattgcgtcttgttgatgccatggtttacacctcagatttgttaaccaacagtgttgtcgttatggcatatgtgactggtggtcttgtacaacaaacgatgcagtggttgtctaacatgctaggcactgctgttgacaagctaaaacccgtgtttacatgggttgaggctaaacttagtgcaggagttgaatttcttagagatgcttgggaaattcttaaattcttgatcacaggagtatttgatgtcattaagggtcaaatacaggttgctacagataacatcaaggaatgtgtaaaaatttttcttggtgttgttaacaaagcacttgaaatgtgtttagaccaggtcacgattgctggcactaagttgagagcgctcaatttaggtgaagtcttcattgcacaaagcagaggactctaccgccagtgtattcgtggcaaagaacagctgcaattactcatgcctcttaaggcaccaaaagaagtcaccttccttgaaggagatgcacatgatacagtactaacctctgaagaggttgtccttaagagtggtgagctcgaggcactagagacaccaattgacagcttcactagtggagctgttgtaggtacacctgtttgtatcaatggcctcatgctcttagagctcgagaataaggaacagtattgtgccttgtctcctggcttgttagcaacaaacaatgtctttcgtctaaagggtggtgcgccggttaaaggtgtgacttttggagaggacactgttttagaagttcaaggctacaagaatgtgaagattacttttgaacttgatgtgcgtgtggataaggtgcttaatgagaagtgctctgtttacactgttgagtctggtactgaggttactgaattcgcatgtgttgtagcggaagctgttgtaaaaactttgcaaccagtttctgaccttcttacccccatgggtattgatcttgacgagtggagtgtagctacattttacttgttcgacgacgctggtgaagaaaaactttcatcacgcatgtattgctctttctaccctcctgatgaggaagaagactgtgaagagtgtgaggatgaggaagaaacctgtgaacatgaatatggcacagaggatgactataaaggtctccctcttgaatttggtgcatcaactgaaacaccacatgttgaagaagaggaagaagaggaagattggcttgatgacgctatagaagcagaacctgaaccagaacctctacctgaagaaccagtcaatcagtttgttggttatttaaagcttactgacaatgttgccattaagtgtattgacattgttaaagaggcacaaagtgctaaaccaacagtgattgttaatgctgctaacacccacttgaaacatggtggtggtgtagctggtgctctaaataaggccactaatggtgctatgcagaatgagagtgatgaatacatcaggcaaaatggacctcttacagttggaggctcatgtttgctttctggacacaatcttgcagagaagtgtctgcatgttgttggacctaacttaaatgccggtgaggatgttcaactccttaaaagggcatatgagaatttcaattcacaggatgtattacttgcacctctattgtcagctggcatatttggtgccaaaccacttcagtcattaaaaatgtgtgttgagatagttcgcacacaagtttatcttgcagtcaatgataagagtctttatgatcagattgtcttagattatctagatagtctgaaacctaaagtggagtcccccaacaaggaggaagagccaaaattggaggagcctaaagcggtgcagccagttgctgagaaacctgttgatgtaaaacctaagattaaggcatgtatcgacgaggtcactacaacactggaggaaactaagtttcttaccaataaattgcttctttttgctgacatcaatggtaaactttaccaagattcacagaatatgttaagaggtgaagacatgtctttcttagagaaagatgcaccatatattgttggtgatgtcatcactagtggtgacatcacttgtgtcataatacctgctaagaagtcgggtgggactacggaaatgctagcaagagcactaaaggaagtcccagttgctgagtatataacaacctatcctggacaagggtgtgctggttatacacttgaagaagcaaagactgcacttaaaaaatgcaaatctgcattttatgttttaccttcagaaacacctaacgagaaggaagaggttcttggcacagtatcatggaacctacgtgaaatgcttgctcatgcagaggagacaagaaaattaatgcctatttgcctggatgttagagctataatggccaccatccagcgcaagtataagggtattaaagttcaggaaggaatcgtggattacggtgtccggttcttcttctatactagcaaggagcctgtagcttctattattacaaagcttaactctttaaatgagccacttgttactatgcccataggttatgtgacacatggtcttaacctagaagaggccgcgcgctgtatgcgctccctcaaggcacctgctgtggtgtcagtttcttcaccagatgctgtcactgcatataatggttacctcacttcgtcttccaagacacctgaggagtattttgtggagactacttctcttgcgggatcgtatagagattggtcttattcaggacaacgtacggaattaggtgttgaatttcttaagcgtggggacaagattgtctatcacactacagggagccccattgagtttcaccttgatggtgaggttcttccacttgacaaactaaagagtctcttgtctcttcgtgaggttaagactattaaggtgtttacaactgtagacaacactaacctccacacgcatattgtggacatgtctatgacttatggacaacagttcggtcctacttatttggatggtgctgatgtcactaaaatcaagccacatgttaatcatgagggtaagacattttttgtactacctagcgatgacacactgcgtagtgaagcttttgagtactaccacactatcgatgagagttttcttggtagatatatgtcagcattaaaccatacaaagaagtggaagtttcctcaggttggtggtttaacttcaatcaaatgggcagacaacaattgttacttgtctagtgtgttacttgcacttcagcaagttgaagtgaaatttaatgcacccgcgcttcaggaagcctattatagggctcgcgccggtgatgctgccaacttttgtgcactcatactggcttacagtaataaaactgtaggcgagctgggtgatgtcagagaaactatgacccatcttttacagcatgctaatttagagtcagctaaaagagttcttaatgtagtatgcaaacactgcggccagaaaacaaccaccttgaagggtgtagaggctgtgatgtacatggggactctgtcttatgatgagcttaagacaggtgtttcaattccttgtgtatgtgggcgtaatgctacacaatatttagtacaacaagaatcttcttttgttatgatgtctgcaccacctgctgagtacaaattacaacagggggcctttttgtgtgctaatgaatacactggcaattatcagtgtggacattacactcacataactgctaaagaaacactctatcgcgtagatggagcacatcttactaagatgtcagaatataaaggaccagtgactgatgttttctacaaggaaacctcctacactacagctatcaaacctgtgtcttataaacttgatggagttacttacacagagattgaaccgaaattagatgggtactataagaagggtaatgcttactacactgagcagcctattgaccttgtcccaacccaaccaatgccaaatgcaagttttgataattttaaacttacatgctctaacactaaatttgctgatgaccttaatcaaatgacaggctttaaaaagccagcctcgcgtgagctaaccgtcacattcttcccagacttgaatggcgatgtagtggctattgattatagacactactccacgagtttcaagaaaggtgcaaaactggtacataagccaattctttggcatattaaccagactacaaacaagacaacgtacaaaccaaacatctggtgtttacgttgtctgtggagtacaaaaccagttgatacttcaaactcctttgaagtcctggtggtagaagacacacaaggaatggataatcttgcttgtgaaagtcagacaaccacctctgaagaagtagtggaaaatcctaccgtacagaaggaaataatagagtgtgacgtgaaaactaccgaagttgtaggcaatgtcatactaaaaccatcagaagaaggtgttaaagttacacaagagttgggccatgaagatctaatggctgcttatgttgaagaaacaagcattaccattaagaagcctaacgagctttcgttagccttaggcttgaaaacacttgccacccatggggccgctgcaataaatagtgtcccatggagtaagattttggcgtatgtcaaacccttccttggacagacagcggttataacttcaaactgcatcaagaaatgtgtgcagcgagtttttagcaactatatgccctatgtcattacattattatttcaattgtgcacttttacaaagagcaccaattccagaataaaagcttcacttcctacgactattgctaaaaatagtgttaagagtgttgctaaattgtgtttggacgtttgcattaattatgtgaaatctcctaagttttctaaattgttcacaattgtaatgtggctattgttgttaagtatttgcctaggttctttaacctatgtaactgctgttcttggtgtatgcctatctagtttaggtgttccttcttattgtgatggcgttagagagttgtatatcaattcatctaacgtcactactatggacttttgtcagggttattttccctgcagtgtctgtttaagtggattagattctcttgattcttacccagctcttgaaaccatccaggttacgatctcatcgtataagctagacctgacatttttgggtttggcagctgaatggttattggcatatatgttgtttacaaagttcttctacttacttggtctctccgccataatgcaagcgttctttggctactttgccagtcatttcattagcaattcttggcttatgtggtttatcattagtattgtacagatggcacctgtttcagcaatggttaggatgtacattttctttgcttctttctattatgtatggaagagctatgttcatattatggatggctgtacttcatcaacttgcatgatgtgctacaaacgcaatcgtgcgacacgtgttgagtgtacaactattgtcaatggcgtgaagagatctttctacgtctatgcaaatggaggtcgtggcttctgtaaggctcacaattggaattgtctcaactgtgacactttttgtgctggtagtactttcattagcgatgaggttgctcgtgatttgtcactccagtttaagagaccaattaatcctactgaccagtctgcatatgtcgtggatagcgttactgtgaaaaacggcgcactccacctctattttgataaggctggccaaaagacttatgagaggcacccactctctcactttgtcaacttagataatttgagggctaacaacactaaaggttcattacctattaatgtcatagtttttgacggcaagtccaaatgtgaggagtctgccgctaaatctgcatctgtgtactacagtcagcttatgtgccaacccattctgttacttgaccaagctcttgtgtcagatgttggagatagtactgaagtttctgttaagatgttcgatgcttatgtagacactttttcagcaacttttagtgttcctatggagaaacttaaagcacttgttgctacagcacatagtgagttggcaaagggtgtagctttagatggtgtcctttctacattcgtgtcggctgcccgtcaaggtgtcgttgatactgatgttgatacaaaggatgtcattgagtgtctcaaactttctcaccattctgatatagaggtgacaggtgacagttgtaacaactttatgctcacctataacaaagttgaaaacatgacgcctagagatcttggtgcatgtattgattgtaatgcaaggcatataaatgcccaagtagcaaaaagccacaatgtttcgctggtttggaacgtcaaggactacatgtctctgtccgaacagctgcgcaagcaaattcgcagtgctgccaaaaagaacaacataccttttagacttacctgtgctactactagacaggttgtcaatgttataactactaaaatctcactcaaaggtggtaaggttgttagtacgtggttcaaacttttgctgaaagtcacacttttgtgtgttcttgctgcattattttgctatgtcattatgccagtacattctttgtctgttcatgatggttatacaaatgaaatcattggttacaaagccattcaggatggtgtcactcgtgacattgtttctactgatgattgttttgctaacaaacatgctggattcgactcatggtttagccagcgtggtggttcttacaggaatgacaaaaactgccctgtagtagcagctatcattactagagaaattggtttcatagtgcctggtttacctggtactgttttgagagcacttaatggtgactttttgcattttctacctcgtgtttttagtgctgttggcaacatttgctacacaccatctaaactcattgagtatagtgattttgctacttctgcttgcgttttggctgctgaatgtactattttcaaggatgctatgggtaagcctgtgccatactgttacgacactaacttacttgagggttctatttcttatagtgaactccgtcctgacacccgttatgtgctcatggatggttctatcatacaattccctaacacttaccttgaggggtctgttagagtagttacaacttttgatgctgagtattgcagacatggtacttgtgaaaggtcagaagttggtgtgtgcttatctactagcggtagatgggttcttaataatgagcattacagagctttaccaggagttttctgtggtgtcgatgctatgaacctcatagctaatatcttcacacctcttgttcaacctgtcggtgctctagatgtgtctgcttcagtagtagcaggtggtattattgccatactggtgacttgtgctgcttactactttatgaaattcagacgtgcgtttggtgagtacaaccatgttgttgccgctaatgcattgctgtttctaatgtctttcactatactctgtctggcacctgcttatagctttttgccgggggtttactctatcttttacttgtacttgactttctattttactaatgatgtctcattcttggctcatctgcaatggtttgccatgttttctcctattgtgcctttctggataacagcaatctatgtgttctgtatttccctaaagcacttccattggttctttagtaactatcttaagaaaagagtcatgtttaatggggttacattcagcacctttgaagaggcagctttatgtacctttttacttaacaaagaaatgtatctgagactgcgtagtgagacactccttccacttacacagtataacagataccttgctctttacaacaagtacaagtattttagcggggccttggatactactagttatcgtgaagcagcttgctgccacttagctaaggctctaaatgacttcagtaactcaggtgctgacgtactctaccagccaccacagacttcaatcacttctgcggttttgcagagtggttttaggaaaatggcatttccctctggtaaagttgaaggatgcatggtacaagtcacctgtggaactacaaccttaaatggtttgtggttggatgacacagtgtactgcccaagacatgttgtttgcacggctgaagacatgcttaacccgaactatgacgacctgctcatccgcaaatctaaccatagtttccttgttcaagctggtaatgtccaacttcgtgttattggccattccatgcaaaattgtctgcttaggcttaaagttgacacttctaaccctaagacaccaaagtataaatttgtccgtatccaaccaggtcagacattttcagtcctagcttgttacaatggctcaccatcaggtgtttatcagtgtgccatgagacctaatcacaccattaagggttccttccttaatggttcatgtggtagtgttggttttaacattgattatgattgcgtgtctttctgctacatgcatcatatggagcttccaactggagtgcacgctggtactgacttagaaggtaaattctatggtccttttgtagatagacagactgcacaggctgctggcacagatacaactattacactgaatgttttagcttggctctatgctgctgttatcaatggtgataggtggttcctaaataggtttaccactactctcaatgactttaatcttgtggcaatgaagtacaattatgaacccctgacacaagatcatgttgacatactaggacccctttctgcgcaaacaggaatcgcagtcttagatatgtgtgctgctctgaaagagcttctacagaatggtatgaatggtcgtactattcttggtagcactattttagaggatgagttcacgccctttgacgttgttagacaatgttctggtgtgaccttccaaggtaagttcaagaaaattgttaaaggtactcatcattggatgcttttgactttcttgacatcacttttaattcttgtccagagtacacagtggtcgctgtttttctttgtttatgagaatgctttcttgccatttgctttaggtattatggctgttgctgcttgcgcaatgcttcttgttaagcataaacatgcattcctgtgcttatttctattaccttctcttgcaacagttgcttacttcaatatggtctacatgcctgctagttgggtgatgcgtataatgacatggcttgaattggccgacactagcctgtctggttatcggcttaaggactgtgttatgtatgcttcagccttagttttgcttatcctcatgactgcccgtactgtttatgatgatgctgctagacgtgtgtggacattgatgaatgtcattacactcgtttataaagtctactatggtaattctttagaccaagctatttccatgtgggctcttgttatttctgtaacctctaactattctggtgtcgttacgacaatcatgttcttagctagagctatagtttttgtgtgtgttgagtattacccacttttgtttattactggcaacactttacagtgtattatgcttgtttattgtttcttaggctattgttgttgttgctactttggcttattttgtttactcaaccgctattttagacttactcttggtgtttacgattatttggtttccacacaggagtttaggtacatgaactctcaggggctcctgccacctaagagtagtattgacgctttcaagcttaacattaaattgttgggcattggaggtaaaccttgtatcaaggttgctactgtacagtctaaaatgtctgacgtaaagtgcacatcagtagtgctgctctcagttctccaacaactcagagtagaatcatcttctaaattgtgggcacagtgtgtacaacttcacaatgatattcttcttgcaaaggacactactgaagcttttgaaaagatggtttcacttttgtccgttctgctatccatgcagggtgctgtagacattaataagttgtgcgaagaaatgcttgacaaccgtgctactcttcaggccatcgcttcagaatttagttctttaccttcgtatgctgcttatgccactgcccaagaggcttatgagcaagctgtatcaaatggtgattctgaagttgttcttaagaagttaaagaaatctttgaatgtggctaaatctgagtttgaccatgatgctgccatgcaacgtaagttggaaaagatggcagatcaagctatgacccaaatgtacaagcaggcaagatctgaagacaagcgggcaaaagtaactagtgcaatgcaaacgatgcttttcactatgcttagaaaacttgataatgatgcacttaacaacattatcaacaatgcacgtgatggttgtgtaccactcaacatcataccacttacaacagcagctaaactcatggttgttgtccctgactatggaacctacaagaacacttgtgatggtaacactttcacatatgcgtcagcactctgggaaattcagcaagttgttgatgcagatagtaaaattgtccagctcagtgaaatcaatatggacaactcaccaaacttggcttggcctcttattgttactgcactaagagccaactcagctgtcaaactacagaataatgaactgagtccagtagcattacgacagatgtcttgtgcggctggtactacgcaaacagcttgtactgatgacaatgcactcgcctattacaacaacgcaaagggaggtaggtttgtgcttgcattactatcagaccaccaggacctcaagtgggctagattccctaagagtgatggtacaggtactatctatacagaactggaaccaccttgcaggtttgttacagacacacctaaaggacctaaagtgaagtatttgtactttattaagggtcttaacaacctaaatagaggtatggtactgggtagtttagctgccacagtacgtcttcaggccggtaatgcgacagaagtgcctgccaattcaactgtgctttctttctgtgctttcgctgtagacccagctaaagcttacaaagattacttagcaagtggtggacaaccaatcacgaattgtgtgaagatgttgtgtacccacaccggtacaggacaggcaatcacggtaacaccagaagctaacatggatcaagagtcctttggtggtgcttcatgctgtctgtattgtagatgccacattgatcatccaaatcctaagggattttgtgacttgaaaggtaagtatgtccaaatacctaccacctgtgctaatgaccctgtgggtttcacactcagaaatacagtctgtaccgtctgcggaatgtggaaaggttatggctgtagttgtgatcaactccgcgaacccatgatgcagtctgcggatgcgtcaacgtttttaaacgggtttgcggtgtaagtgcggcccgtcttacaccgtgcggcacaggcactagcactgatgtcgtttatagggcttttgatatttacaacgagaaagttgctggttttgcaaagttcctaaagactaattgctgccgcttccaagaaaaggatgaggaaggcaatttattagactcttatttcgtagttaagaggcacacaatgtccaactaccaacatgaagagactatttacaacttgattaaagagtgtccagccgttgctgttcatgactttttcaagtttagagtggatggtgacatggtaccacatatatcacgtcaacgtctaactaaatacacaatggctgatttagtctatgctctacgtcattttgacgagggcaattgtgatacattaaaggaaatacttgtcacatacaattgttgtgatgacaactatttcaataagaaggattggtatgattttgtagaaaatcctgatgttctacgcgtatacgcgaacctaggtgagcgtgtacgtcgagccttactgaagactgtgcaattctgcgatgctatgcgtgatgcgggtatcgtaggtgtactgacactagataatcaggatctgaatgggaattggtacgattttggagacttcgtacaggtagcaccaggctgcggggttcctattgtggattcatactattctttgctgatgcctatcttgacactcacaaaggccttagctgctgagtcccatatggacgctgatctcgcgaagccacttgtaaagtgggatttgctcaaatatgatttcacggaagagagactatgtcttttcgaccgttattttaaatattgggatcagacataccatcctaattgtattaattgtttggatgacaggtgtatccttcattgtgcaaactttaatgtattattttctactgtgtttccacctacgagttttggaccactagtaagaaagatatttgtagatggtgtaccttttgttgtttcaacgggctaccatttccgtgagctaggggttgtacataatcaggatgtaaacttacatagctcacgcctcagttttaaggaacttttagtgtacgctgctgatccagccatgcatgctgcctctggcaatttgttgttagataaacgtactacatgcttttcagtagctgcactaacaaataatgttgcttttcaaactgtcaaacccggtaattttaataaagacttttatgactttgctgtgtctaaaggcttctttaaggaaggaagttctgttgaattaaaacacttcttctttgctcaggatggcaacgctgctatcagtgattatgactattaccgttataatctgccaacaatgtgtgatattagacaactcctattcgtagttgaggttgtcgataaatactttgattgttacgatggtggctgtatcaatgccaaccaagttatcgttaacaatctggacaaatcagctggtttcccatttaacaagtggggtaaggctagactttattatgactcaatgagttatgaggaccaagatgcattgttcgcatacactaagcgtaatgtcatccctacaataactcaaatgaaccttaagtatgccattagtgcaaagaatagagctcgcacagttgctggtgtctctatctgtagtactatgaccaatagacagtttcatcagaaattattaaagtcaatagccgctactagaggagctactgtggtaattggaacaagcaaattttatggtggctggcataatatgttaaaaactgtttacagtgatgtagaaagtcctcacctcatgggttgggactacccaaaatgtgacagagccatgcctaatatgcttagaatcatggcttccctcattcttgctcgcaaacatagcacttgttgtaacttgtcacaccgtttctatagattagctaatgagtgtgcacaggtattaagtgagatggtcatgtgtggcggctcattatatgtgaaaccaggtgggacatcatccggtgatgccacaactgcatatgctaatagtgtgtttaacatctgtcaagcagtaacagctaacgtaaatgcacttctttcaactgatggtaataagattgctgataagtacgtccgcaatcttcaacatagactttatgagtgtctctatagaaacagagatgtggatcatgagttcgtggatgaattttatgcatatttgcgtaagcacttctccatgatgattctttctgacgatgccgttgtgtgctataatagtaattacgcggcacagggtctagtagctagcattaagaacttcaaagcagttctttactaccaaaataatgtgtttatgtctgaggcgaaatgctggactgagactgaccttactagaggacctcatgaattttgctctcagcacacgatgctagttaaacaaggagatgattacgtgtacctgccttacccagatccatctagaatattaggcgcaggctgttttgtcgacgacattgtcaaaacagatggtacactcatgattgaaaggtttgtgtcattagcaattgacgcctacccacttacaaagcaccctaatcaagagtatgctgatgttttccatttatacttacagtatattaggaaattacatgatgagcttactggtcacatgttggacatgtactctgtaatgctaactaatgacaacacctcgaggtactgggaacctgaattttatgaagctatgtacacaccacacacagttttacaagctgtaggtgcttgtgtgttatgtaattcacagacttcgcttcgttgcggcgcttgtattaggagacctttcctttgttgcaagtgctgctatgaccatgtcatttcaacatcacataaattagtgttgtctgttaatccctatgtttgcaatgcacccggttgtgacgtcacagatgtgacacaactctatttaggaggtatgagctattattgcaagtcacataaaccacccattagttttcctttgtgtgctaatggtcaggtttttggtttatacaaaaacacatgtgtgggcagtgacaatgtaactgacttcaatgcaatagcgacatgtgattggactaatgctggcgattatatacttgccaacacttgtacagagagactcaaactttttgcagcggaaacgctcaaagctactgaggagacattcaagctatcttatggtattgccactgttcgtgaagtactgtcagatagagaactttacctttcgtgggaggtaggaaaacctagaccaccactgaatagaaattatgtctttacaggttaccgtgtgacaaaaaacagtaaagtacagattggagagtacacctttgaaaaaggtgactatggtgatgctgttgtgtacagaggtactacaacttataaattgaatgttggtgattactttgtgttaacatcacatacagtaatgccattaagtgcaccaacactagtgccacaggagcactatgtgcgaataactggcttataccctacactcaacatctctaatgagttttctagcaatgttgcaaattaccaaaaaatcggtatgcagaagtactctacactccaaggaccacctggtactggtaagagtcactttgctattggacttgccctctactacccatctgctcgcatagtgtatacagcttgctctcatgctgctgttgatgcgctatgtgaaaaggcattaaaatacttgcctatagataagtgtagtagaattatacctgcacgtgcgcgtgtagagtgttttgataaattcaaagttaattcaacattagaacagtatgttttctgcactgttaatgctctgcccgaaactactgctgatatagtggtctttgatgaaatttcaatggccactaattatgatttgagtgttgtcaatgctagactacgtgcaaaacactacgtttacattggtgacccagctcaattacctgcaccacgcacattgctaacaaaaggcacacttgaaccagaatatttcaattcagtgtgcagacttatgaaaacaataggtccagacatgttccttggaacctgtcgtcgttgtcctgccgaaattgttgacacagtgagtgccttagtttatgacaataagctaaaagcacacaaggagaagtcagcgcaatgcttcaaaatgtattacaagggtgtgattacgcatgatgtgtcatctgcaatcaacaggccacaaataggtgtagtaagagaatttcttacgcgcaaccctgcttggagaaaagctgtttttatttcaccatataattcacagaatgcagtggcatcaaagattttagggttgcccactcaaactgttgattcttcacagggttctgaatatgactatgtcatattcacacaaaccactgagactgcacactcttgtaatgtaaaccgctttaatgtggccatcacaagagcaaaaattggcattttgtgtataatgtctgatagagacctttatgacaagctgcaatttacgagtctagaagtaccacgccgaaatgtggctactttacaagcagaaaatgtgactggactttttaaggactgtagcaagatcattactggtcttcatccaacacaggcacctacacatctcagtgttgatactaaattcaaaactgaaggactttgtgtcgacataccaggaataccaaaggacatgacctaccgtagactcatctctatgatgggcttcaaaatgaattaccaagttaatggttaccctaatatgtttatcacccgtgaagaagctattcgtcacgttcgtgcatggataggctttgatgtagagggttgtcatgctactagagatgctgtaggaacaaatctaccactccagttagggttttcaacaggtgttaacctagtggccgtaccgactggctatgttgacactgaaaatagcacagaattcaccagagttaatgcaaaacctcctccaggtgatcaatttaagcatcttataccacttatgtacaaaggtttgccctggaacgtggtgcgtattaagattgttcaaatgctcagtgatacgctgaaaggattatcagacagagttgtgtttgtcctctgggcacatggctttgaactcacatcgatgaagtactttgtcaagattggaccagaaagaacgtgttgtctgtgtgacaagcgtgcaacttgcttctccacttcatctgatacttatgcctgctggaatcactctgtgggttttgactatgtctacaacccgtttatgattgatgtacagcagtggggttttacaggtaacttgcagagtaaccacgatcagcactgccaagtgcatggtaatgctcatgtagctagttgtgatgctatcatgactagatgtctcgcagtccatgagtgcttcgttaagcgcgtcgattggtctgttgaatatccgattatcggagatgaactgaagatcaacgccgcatgcagaaaagtacagcatatggttgtcaagtctgcattgcttgctgataaatttacagttcttcatgacattggaaacccaaaggcaattagatgtgtgccgcaggctgaagtagactggaaattctacgacgctcagccttgcagtgacaaagcttataaaatagaagaactcttctactcatatgccacacatcatgacaagttcacagatggtgtctgtttgttttggaactgtaacgttgatcgttacccagccaatgctattgtgtgtaggtttgatacccgagtgctctctaatttaaacctacctggttgtgatggtggtagtttgtatgttaataagcatgcattccacactccagcttttgataagagtgcatttacacatttgaagcaactgcctttcttttattattctgacagtccttgtgagtctcatggtaaacaggtcgtgtcagacattgattatgtcccactaaagtctgctacgtgtattacacgctgcaacttaggtggtgctgtttgtagacatcatgcaaatgagtatagacagtacttggatgcatacaatatgatgatttctgctggatttagcctttggatttataaacaatttgatacttacaacttgtggaatactttcactaagttgcagagtttagaaaatgtggcttataatgttgtcaacaagggacactttgatggacagagtggtgaagcacctgtatccatcattaataatgctgtttacactaaagtagatggcattgacgtggaaattttcgagaacaagacaacacttcctgttaatgtggcgtttgagctttgggcaaagcgtaacattaaaccagtgcctgagattaagatactcaataatttgggtgtcgacatcgccgctaataatgttatctgggactataaaagagaagccccagcgcatgtttctacaataggtgtctgtacaatgactgacattgcaaagaaacctactgagagtgcttgttcatcactcattgtcttgtttgacggtagagttgagggacaggtagactttttcagaaatgctcgcaatggtgttttaataacagaaggttcagttaagggcttaacaccttcgaaaggacccgcacaagctagtgtcaatggagtcacattaattggagaatcagtaaaaacacagtttaattattttaagaaagtggatggcataattcagcaattgccggaaacctactttactcaaagcagagacttagaggatttcaagcccagatcacaaatggaaactgatttcctcgagctcgcaatggatgagttcatacaacggtataagctagagggctatgctttcgagcatatcgtttatggagatttcagtcatggacaacttggcgggttgcatctaatgattggtctagccaagcgctcacaagattcactgcttaaactagaggattttatccctatggatagcacagtgaaaaattacttcataacagatgctcaaacaggttcatcaaaatgtgtctgctctgttattgatcttttacttgatgactttgttgaaataataaagtcacaagacctttcagtagtttcaaaagtggtcaaagttacaattgactatgctgaaatatcatttatgctttggtgtaaggatggacatgttgaaaccttctacccaaaattacaggcaagtcaagcatggcaaccaggtgtcgctatgcctaacttgtataagatgcaaagaatgcttcttgaaaaatgtgaccttcagaattatggtgaaaatgctgtcataccaaaaggaataatgatgaatgttgcaaaatatacccaactgtgtcaatacttaaacacacttacattagctgtgccttataacatgagagtgatacactttggtgcaggctctgataaaggagtagcacccggtacagctgttctcaggcagtggttgccaactggcacactacttgttgattctgatctaaacgacttcgtctctgacgctgattctacattgattggagactgtgccactgtacatacagctaataaatgggatctcatcattagcgatatgtatgaccctaagaccaaacatgtgttaaaggataatgactcaaaagaggggtttttcacttatctatgtggatttattaaacaaaaactagccctgggaggttctgtagctgttaagataacagagcattcttggaatgccgatctttacaagcttatgggacatttctcatggtggacagcctttgttacaaatgtaaatgcatcatcatcagaagcatttttaattggagttaactatcttggcaagccaaaggaacaaattgatggctataccatgcacgctaactacatcttttggaggaacacaaaccctattcaattgtcttcctattcattatttgacatgagcaaatttcctcttaagttaagaggaacagctgttatgtctttaaaagagaatcaaatcaatgacatgatttactctctgctcgaaaagggtaggcttatcattagagaaaacaatagagttgtagtctcaagtgatattcttgtcaacaactaaacgaacatgaaaattttaatttttgctttcttagctaatttagctaaagcacaggaaggatgcggtatcatcagtagaaaaccgcaacctaaaatggcacaagtctcatcttctcgtcggggcgtttattataatgatgacattttccgttctgatgtgttacacctcacacaggattacttcctgccatttgactcaaatttaactcagtacttttcgcttaatgtggattcagataggtatacctattttgacaaccccatactagactttggtgatggcgtttatttcgctgccactgaaaagtctaacgtaataagaggctggatttttggttcatcttttgataacaccacccagtcagctgttatagttaataattcaacacacattattatacgtgtgtgtaattttaacttatgtaaagaacccatgtatactgttagtagaggtacacagcaaaatgcctgggtttatcagagtgcatttaattgtacatatgaccgagtggaaaagagttttcaacttgacactactcctaaaactggaaattttaaagacctacgtgagtatgtctttaaaaatagggatggctttctgtctgtctaccaaacttatactgctgttaatttacccagaggactacccacgggtttctcagtcttgaaaccaattttaaaattgccctttggaattaatatcacttcttatagagtagttatggcaatgtttagccaaactacttctaattttttaccagaaagtgctgcttattatgttggtaatcttaaatattctaccttcatgctccgatttaatgaaaatgggacgatcacggatgctgtagattgttcccaaaatcctcttgctgaattaaaatgcaccattaaaaatttcaatgttgacaaaggaatctaccaaacatccaacttcagagtttcacccactcaagaggttattagatttcctaacattacaaatcgctgtccttttgacaaggtttttaatgctactcgctttcctaatgtttatgcatgggagagaacaaaaatctctgattgtgttgctgactacactgttctctacaactcaacctctttctcgacttttaaatgttatggagtgtctccatctaagttgattgacctatgctttacaagtgtgtatgctgatacattcttgataagatcttctgaagtaagacaagttgcaccaggtgaaactggtgttattgctgactacaattacaagttgcctgatgatttcactggctgtgtaattgcttggaatactgctaaacatgatactggcaattattactacagatctcatcgcaagactaagttaaagccttttgagagagacctgtcttctgacgatggtaatggtgtgtatacactctcaacatatgactttaaccctaacgttccagtagcatatcaggctactagggttgttgtactctcttttgaacttcttaatgcacctgctacagtttgtggacctaaattatccacagaactagttaagaaccagtgtgttaatttcaatttcaatggacttaaaggtactggtgttttgacttcttcttcaaaaagattccagtcatttcaacaatttggtcgtgacacatctgactttacggattcagtacgtgacccacagactttagaaatacttgacatttcaccttgttcctttggtggtgttagtgttatcacacctggaacgaacgcctcatcagaggtagctgttctctatcaagatgtaaattgcactgatgtccctacagcaatacgtgcagatcaattaacacctgcttggcgcgtttattccactggagtaaatgtgtttcaaacacaagctggctgtcttataggagctgagcatgtcaacgcctcttatgagtgtgacattcctattggtgcaggcatttgtgctagttaccatacagcttctgttctacgtagtaccggccagaaatcaattgttgcctatactatgtcactgggtgctgaaaattccattgcatacgctaataattcaattgccatacctacaaatttttcaatcagtgtcactacagaagtgatgcctgtttcaatggctaaaacagccgtggattgtactatgtacatctgcggtgattctttagagtgcagcaacttactattgcagtatggaagcttttgcacacaactcaatcgtgccctcactggcattgctatagaacaggacaaaaacactcaggaggtctttgcccaggttaaacaaatgtacaagacacctgccataaaggactttggcggtttcaatttttcacaaatattgcctgacccttcaaagccaacgaagagatcatttattgaagacttgctcttcaataaagtgactctcgctgatgctggctttatgaaacaatatggtgactgcctaggtgatgttagtgctagagaccttatctgtgcccagaagttcaatggacttactgtgctaccgccactgctcacagatgagatggttgctgcatacacagctgcgctagttagtggtactgctacggcgggctggacgtttggtgcaggtgcagctcttcaaataccatttgctatgcaaatggcttataggtttaatggcattggagttactcaaaatgttctctatgagaaccaaaagctgatagccaatcagtttaatagtgctataggcaaaattcaagaatcattatcatctactgcaagtgcactaggaaaactgcaggatgtggttaaccaaaatgcacaagctcttaacacgcttgttaaacaactcagctctaattttggagctatctcaagtgtgttaaatgatattctctctcgccttgataaagttgaggcagaagttcaaattgacaggttgattacaggcagattgcaaagccttcaaacctacgtaacacaacaacttatcagagctgctgaaatcagagcttctgctaatcttgctgctactaaaatgtctgagtgcgttcttggacaatcaaaaagagttgatttctgtggaaaaggctaccaccttatgtccttccctcaatcagcacctcacggtgtcgtttttctacatgtcacatatgtgccatcacaagagaaaaacttcacaacagctccagctatttgtcacgaaggcaaagcttatttccctcgtgaaggtgtctttgtgtctaatggcacttcttggtttattacgcagaggaatttttactctccacaattaattacaacagataatacttttgtttctggtaattgtgatgtcgtgatcggcatcattaataatactgtttatgatcctctgcagcctgaacttgactcgtttaaggaagagctggacaagtacttcaaaaatcatacatcaccagatgttgatcttggcgacatttcaggcattaatgcttcagtcgtcaacattcaaaaggagattgaccgactcaatgaggttgccaaaaacctaaatgaatcactcattgacctccaagaacttgggaaatatgagcaatacatcaagtggccttggtatgtttggctcggctttattgctggactaattgccatcgtcatggttacaatcttgctttgttgcatgaccagctgttgcagttgtctcaagggtgcatgctcttgtggttcgtgctgcaaatttgatgaggacgactctgagccagtgctcaaaggagtcaaattacattacacataaacgaacttaatggatttgtttatgagcattttcacattgggagcaatcacgcgcaatccagcgaaaattgaaaatgcttctcctgcaagtactgttcatgctactgcaacgataccactacaagccacattccctttcggatggcttattgttggcgttgcacttcttgctgtttttcaaagcgcttctaaagtaattgcgcttcatagaaggtggcagctcgccttatataaaggcgttcaacttgtatgtaatatgctgctgctttttgtgacaatttactcacaccttctacttctagctgcttgcatggaagcacaattcttgtacatctatgccctgatttatatcttgcaaattgtaagtttttgtagatttatcatgagatgctggctgtgctggaagtgcagatccaaaaatccattactctatgatgctaactattttgtatgttggcatactaataactatgactactgtataccatacaacagtgtcacagatacagttgtcatcacctcaggtgatggaacaaatcagccaaaactaaaagaagactatcaaattggtggttattctgaggattggcattcaggtgttaaagactatgtagtaatatatggctatttcaccgaagtttattaccagcttgaatcgactcaattgtcgactgatactggtgctgaaaatgctacattcttcatctatagcaagcttgttaaagatgtagatcatgtgcaaatacacacaatcgacggctcttcaggagttgtaaatccagcaatggatccaatttatgatgagccgacgacgactactagcgtgcctttgtaagcacaagaaagtgagtacgaacttatgtactcattcgtttcggaagagacaggtacgttaatagttaatagcgtacttcttttccttgctttcgtggtattcttgctagtcacactagccatccttactgcgcttcgattgtgtgcgtactgctgcaatattgttaacgtgagtttagtaaaaccaacagtttacgtttactcacgtgttaaaaatctgaactcttctgagggagttcctgatcttctggtctaaacgaactaactattattattattctgtttggaactttaacattgctcatcatggcagacaacggtacaattactgttgaggagcttaaacaactcctggaacaatggaatctagtaataggtttcattttccttgcttggattatgttactacagtttgcctattccaaccggaacaggtttctgtatataataaagcttgttttcctctggctcttgtggccagtaacacttgcttgctttgtgcttgctgctgtttacagaattaattgggtgactggcggaattgcgattgcaatggcttgtatagtaggcttgatgtggcttagctacttcgttgcttctttcaggctgtttgctcgcacccgctcaatgtggtcattcaatccagaaacaaatattcttctcaatgtgcctcttcgggggacaattctgaccagaccgctcatggaaagtgaacttgtcattggtgctgtgatcattcgtggtcacttgcggatggctggacactcccttgggcgctgtgacataaaggacctgccaaaagagattacggtggctacatcacgaacgctttcttattacaaattaggagcgtcgcagcgtgtaggcactgattcaggttttgctgcatacaaccgctaccgaattggaaactacaaactaaatacagaccattcaggtagcaacgacaatattgctttgctagtacagtaagtgacaacagatgtttcatctagttgacttccaggttacaatagcagagatattgattatcattatgaaaactttcagggttgccatttggaaccttgacatactaataagttcaatagtgagacaattatttaagcctctaactaagaagaattattcagagttagatgatgaagaacctatggagttagattatccataaaacgaacatgaaaattattctcttcttgacattgatagcgcttgcaacttgtgagttatatcattatcaggagtgtgttaggggtacgactgtactactaaaagaaccttgcccatcaggaacatatgagggcaattcaccatttcaccctcttgctgataataaatttgcactaacttgctctagcacacattttgcttttgcttgtgctgacggtactagacacacctatcagcttcgtgcaagatcagtttcaccaaaacttttcatcagacaagaggaagtttatcaagagctctactcaccacttttcctcattgttgctgcattagtatttataatactttgcttcaccattaagagaaagacagaatgaatgagctcactttaattgacttctatttgtgctttttagcctttctgctattccttgttttaattatgcttcttatattttggttctcgcttgagattcaggacatagaagaaccttgtaacaaagtctaaacgaacatgaaacttctcattgtttttggactcttagcatcagtgtactgcttccacagagaatgcagcatacaagagtgttgtgaaaatcaaccctaccaaattgaagacccatgtccaatacattactattcggactggtttataaaaattggatctagaaaatcggctcgcctcgtacaattgtgcgaaggtgattacggacgaagaattccaattcattatgagatgtttggcaattacactatctcctgtgaaccactagagataaattgtcaggctccaccagtaggtagtctaatcgttcgttgttcatacgattatgactttgttgagcatcatgacgttcgtgttgttctagatttcatctaaacgaacaaactaaaatgtctgataatggaccccaaagtcaacgtagtgccccccgcattacatttggtggacccgcagattcaaatgacaataaccaggatggaggacgcagtggtgcacgaccaaaacaacgccggccccaaggtttacccaataatactgcgtcttggttcacagctctcactcagcatggcaaagaggaacttagattccctcgaggccagggcgttccaatcaacaccaatagtggtaaagatgaccaaattggctactaccgaagagctacccgacgagttcgtggtggtgacggcaaaatgaaagagctcagccccagatggtatttctattacctaggaactggcccagaagcttcacttccctatggcgctaataaagaaggcatcgtatgggtcgcaactgagggagccttgaatacaccgaaagatcacattggcacccgcaaccctaataacaatgctgccatcgtgctacaacttcctcaaggaacaacattgccaaaaggcttctacgcagaggggagcagaggtggcagtcaatcttcatctcgctcctcatcacgtagtcgcggtaattcaagaaattcaactcctggcagcagtaggggaagttctcctgctcgattggctagcggaggtggtgaaactgccctcgcgctattgctgctagacagattgaatcagcttgagagcaaagtttctggtaaaggccaacaacaaccaggccaaaccgtcactaagaaatctgctgctgaggcatcgaagaagcctcgccaaaaacgtactgctactaaacagtacaacgtcactcaagcatttgggagacgtggtccagagcaaacccaaggaaactttggggaccaagaactaatcagacaaggaattgattacaaacattggccgcaaattgcacaatttgctccaagtgcctctgcattcttcggaatgtcacgcattggcatggaagtcacaccttcgggaacatggctgacttatcatggagccatcaaattggatgacaaagatccacaattcaaagacaacgtcatactgctgaacaagcacattgacgcatataaaacattcccaccaacagagcctaaaaaggacaaaaagaaaaagactgatgaagctcagcctttaccgcagagacaaaagaagcagcccactgtgactcttcttcctgcggctgacatggatgatttctccagacaacttcaacattccatgagtggagcttctgctgattctactcaggcataaacactcatgatgaccacacaaggcagatgggctatgtaaacgttttcgcaattccgtttacgatacatagtctactcttgtgcagaatgaattctcgtagctaaacagcacaagtaggtttagttaactttaatctcacatagcaatctttaatcaatgtgtaacattagggaggacttgaaagagccaccacattttcaccgaggccacgcggagtacgatcgagggtacagtgaataatgctagggagagctgcctatatggaagagccctaatgtgtaaaattaattttagtagtgctatccccatgtgattttaatagcttcttaggagaatgacaaaaaaaaaaaaaaaaaaaaaaaa
